(19) United States
(12) Patent Application Publication
(10) Pub. No.: US 2022/0002436 A1
(43) Pub. Date: Jan. 6, 2022

(54) ANTI-HER2 POLYPEPTIDES AND METHODS OF USE THEREOF

(71) Applicant: Denali Therapeutics Inc., South San Francisco, CA (US)

(72) Inventors: Mark S. Dennis, South San Francisco, CA (US); Wanda Kwan, South San Francisco, CA (US); Joseph W. Lewcock, South San Francisco, CA (US); Jonathan Sockolosky, South San Francisco, CA (US); Joy Yu Zuchero, South San Francisco, CA (US)

(73) Assignee: Denali Therapeutics Inc., South San Francisco, CA (US)

(21) Appl. No.: 17/178,595

(22) Filed: Feb. 18, 2021

Related U.S. Application Data
(63) Continuation of application No. PCT/US2019/047728, filed on Aug. 22, 2019.
(60) Provisional application No. 62/721,505, filed on Aug. 22, 2018.

(51) Int. Cl. C07K 16/32; A61P 35/00

(52) U.S. Cl. CPC C07K 16/32; A61P 35/00; C07K 2319/00; C07K 2317/526; C07K 2317/71; C07K 2317/565

(57) ABSTRACT

The present disclosure relates to anti-HER2 constructs, such as Fc polypeptide dimer-antibody variable region fusion proteins, that cross the BBB and bind to HER2 in the brain parenchyma. In some embodiments, the anti-HER2 constructs (e.g., Fc polypeptide dimer-antibody variable region fusion proteins) retain effector function upon binding to HER2, but do not substantially deplete reticulocytes in vivo. The present disclosure also relates to methods for transcytosing an anti-HER2 antibody variable region across the BBB and treating HER2-positive cancers and metastatic lesions thereof.

[0001] The present application is a continuation of International Application No. PCT/US2019/047728, filed on Aug. 22, 2019, which claims priority to U.S. Provisional Patent Application No. 62/721,505, filed Aug. 22, 2018, the disclosure of which are incorporated herein by reference in their entirety for all purposes.

### SEQUENCE LISTING

[0002] This application contains a Sequence Listing which has been submitted electronically in ASCII format and is hereby incorporated by reference in its entirety for all purposes. Said ASCII copy, created on Feb. 9, 2021, is named 102342-003210US-1235824_SL.txt and is 834,580 bytes in size.

### BACKGROUND

[0003] Treatment of brain metastases of cancers such as breast cancer currently poses a daunting clinical challenge. Among breast cancer patients, the incidence of brain metastases is as high as 50%. Clinical data indicate that there is a proclivity for HER2-positive breast cancers to metastasize to the brain. Notably, anti-HER2 therapies have proven useful for the control of extracranial tumors but not intracranial lesions. The failure of these therapies to control metastatic lesions such as brain metastases of HER2-positive breast cancer is mostly attributed to an inability of the therapeutic agents to cross the blood brain barrier (BBB) and access the brain parenchyma. Thus, there is a need for new therapeutic agents that can cross the BBB and target HER2 in the brain parenchyma.

### SUMMARY

[0004] In some aspects, provided herein is an Fc polypeptide dimer-antibody variable region fusion protein comprising: (a) an antibody variable region that is capable of binding human epidermal growth factor receptor 2 (HER2), or an antigen-binding fragment thereof; and (b) a modified Fc polypeptide dimer comprising a first Fc polypeptide that contains amino acid modification(s) to create a TfR-binding site. The antibody variable region may include a heavy chain variable region and a light chain variable region.

[0005] In some embodiments, the protein includes (i) two copies of an antibody light chain, (ii) a first heavy chain variable region that is fused to the first Fc polypeptide, and (iii) a second heavy chain variable region that is fused to a second Fc polypeptide. Each light chain may be paired with one of the heavy chain variable regions, the first and second Fc polypeptides may together form the Fc dimer. The first heavy chain variable region may (from N-terminal to C-terminal) be fused to a CH1 domain, which, in turn, is fused to a hinge region, which in turn is fused to the first Fc polypeptide and/or the second heavy chain variable region may (from N-terminal to C-terminal) be fused to a CH1 domain, which, in turn, is fused to a hinge region, which in turn is fused to the second Fc polypeptide.

[0006] In some embodiments, the antibody variable region comprises one or more (e.g., all six) complementarity determining regions (CDRs) selected from the group consisting of: (a) a heavy chain CDR1 having at least 90% sequence identity to the amino acid sequence of SEQ ID NO:69 or having up to two amino acid substitutions relative to the amino acid sequence of SEQ ID NO:69; (b) a heavy chain CDR2 having at least 90% sequence identity to the amino acid sequence of SEQ ID NO:70 or having up to two amino acid substitutions relative to the amino acid sequence of SEQ ID NO:70; (c) a heavy chain CDR3 having at least 90% sequence identity to the amino acid sequence of SEQ ID NO:71 or having up to two amino acid substitutions relative to the amino acid sequence of SEQ ID NO:71; (d) a light chain CDR1 having at least 90% sequence identity to the amino acid sequence of SEQ ID NO:72 or having up to two amino acid substitutions relative to the amino acid sequence of SEQ ID NO:72; (e) a light chain CDR2 having up to two amino acid substitutions relative to the amino acid sequence of SEQ ID NO:73; and (f) a light chain CDR3 having up to two amino acid substitutions relative to the amino acid sequence of SEQ ID NO:74.

[0007] In some embodiments, the antibody variable region comprises one or more (e.g., all six) CDRs selected from the group consisting of: (a) a heavy chain CDR1 comprising the amino acid sequence of SEQ ID NO:69; (b) a heavy chain CDR2 comprising the amino acid sequence of SEQ ID NO:70; (c) a heavy chain CDR3 comprising the amino acid sequence of SEQ ID NO:71; (d) a light chain CDR1 comprising the amino acid sequence of SEQ ID NO:72; (e) a light chain CDR2 comprising the amino acid sequence of SEQ ID NO:73; and (f) a light chain CDR3 comprising the amino acid sequence of SEQ ID NO:74.

[0008] In some embodiments, the antibody variable region comprises two antibody heavy chain variable regions comprising the amino acid sequence of SEQ ID NO:59 and two light chain variable regions comprising the amino acid sequence of SEQ ID NO:60.

[0009] In some embodiments, the antibody variable region comprises one or more (e.g., all six) CDRs selected from the group consisting of: (a) a heavy chain CDR1 having at least 90% sequence identity to the amino acid sequence of SEQ ID NO:75 or having up to two amino acid substitutions relative to the amino acid sequence of SEQ ID NO:75; (b) a heavy chain CDR2 having at least 90% sequence identity to the amino acid sequence of SEQ ID NO:76 or having up to two amino acid substitutions relative to the amino acid sequence of SEQ ID NO:76; (c) a heavy chain CDR3 having at least 90% sequence identity to the amino acid sequence of SEQ ID NO:77 or having up to two amino acid substitutions relative to the amino acid sequence of SEQ ID NO:77; (d) a light chain CDR1 having at least 90% sequence identity to the amino acid sequence of SEQ ID NO:78 or having up to two amino acid substitutions relative to the amino acid sequence of SEQ ID NO:78; (e) a light chain CDR2 having up to two amino acid substitutions relative to the amino acid sequence of SEQ ID NO:79; and (f) a light chain CDR3 having up to two amino acid substitutions relative to the amino acid sequence of SEQ ID NO:80.

[0010] In some embodiments, the antibody variable region comprises one or more CDRs (e.g., all six) selected from the group consisting of: (a) a heavy chain CDR1 comprising the amino acid sequence of SEQ ID NO:75; (b) a heavy chain CDR2 comprising the amino acid sequence of SEQ ID NO:76; (c) a heavy chain CDR3 comprising the amino acid sequence of SEQ ID NO:77; (d) a light chain CDR1 comprising the amino acid sequence of SEQ ID NO:78; (e) a light chain CDR2 comprising the amino acid sequence of SEQ ID NO:79; and (f) a light chain CDR3 comprising the amino acid sequence of SEQ ID NO:80.

[0011] In some embodiments, the antibody variable region comprises two antibody heavy chain variable regions comprising the amino acid sequence of SEQ ID NO:61 and two light chain variable regions comprising the amino acid sequence of SEQ ID NO:62.

[0012] In some embodiments, the antibody variable region comprises one or more (e.g., all six) complementarity determining regions (CDRs) selected from the group consisting of: (a) a heavy chain CDR1 having at least 90% sequence identity to the amino acid sequence of SEQ ID NO:250 or having up to two amino acid substitutions relative to the amino acid sequence of SEQ ID NO:250; (b) a heavy chain CDR2 having at least 90% sequence identity to the amino acid sequence of SEQ ID NO:251 or having up to two amino acid substitutions relative to the amino acid sequence of SEQ ID NO:251; (c) a heavy chain CDR3 having at least 90% sequence identity to the amino acid sequence of SEQ ID NO:252 or having up to two amino acid substitutions relative to the amino acid sequence of SEQ ID NO:252; (d) a light chain CDR1 having at least 90% sequence identity to the amino acid sequence of SEQ ID NO:253 or having up to two amino acid substitutions relative to the amino acid sequence of SEQ ID NO:253; (e) a light chain CDR2 having up to two amino acid substitutions relative to the amino acid sequence of SEQ ID NO:254; and (f) a light chain CDR3 having up to two amino acid substitutions relative to the amino acid sequence of SEQ ID NO:255.

[0013] In some embodiments, the antibody variable region comprises one or more (e.g., all six) CDRs selected from the group consisting of: (a) a heavy chain CDR1 comprising the amino acid sequence of SEQ ID NO:250; (b) a heavy chain CDR2 comprising the amino acid sequence of SEQ ID NO:251; (c) a heavy chain CDR3 comprising the amino acid sequence of SEQ ID NO:252; (d) a light chain CDR1 comprising the amino acid sequence of SEQ ID NO:253; (e) a light chain CDR2 comprising the amino acid sequence of SEQ ID NO:254; and (f) a light chain CDR3 comprising the amino acid sequence of SEQ ID NO:255.

[0014] In some embodiments, the antibody variable region comprises two antibody heavy chain variable regions comprising the amino acid sequence of SEQ ID NO:256 and two light chain variable regions comprising the amino acid sequence of SEQ ID NO:257.

[0015] In some embodiments, the TfR-binding site is within a modified CH3 domain. In some embodiments, the modified CH3 domain is derived from a human IgG1, IgG2, IgG3, or IgG4 CH3 domain. In some embodiments, the modified CH3 domain comprises one, two, three, four, five, six, seven, eight, nine, ten, or eleven substitutions in a set of amino acid positions comprising 380, 384, 386, 387, 388, 389, 390, 413, 415, 416, and 421, according to EU numbering. In some embodiments, the modified CH3 domain comprises Glu, Leu, Ser, Val, Trp, Tyr, or Gln at position 380; Leu, Tyr, Phe, Trp, Met, Pro, or Val at position 384; Leu, Thr, His, Pro, Asn, Val, or Phe at position 386; Val, Pro, Ile, or an acidic amino acid at position 387; Trp at position 388; an aliphatic amino acid, Gly, Ser, Thr, or Asn at position 389; Gly, His, Gln, Leu, Lys, Val, Phe, Ser, Ala, Asp, Glu, Asn, Arg, or Thr at position 390; an acidic amino acid, Ala, Ser, Leu, Thr, Pro, Ile, or His at position 413; Glu, Ser, Asp, Gly, Thr, Pro, Gln, or Arg at position 415; Thr, Arg, Asn, or an acidic amino acid at position 416; and/or an aromatic amino acid, His, or Lys at position 421, according to EU numbering.

[0016] In some embodiments, the Fc polypeptide dimer-antibody variable region fusion protein binds to the apical domain of TfR. In some embodiments, one of the Fc polypeptides contains amino acid modifications that reduce FcγR binding when the Fc polypeptide dimer is bound to TfR (e.g., but has limited or no reduction of binding when not bound to TfR). These modifications may comprise Ala at position 234 and at position 235 on the first Fc polypeptide, according to EU numbering. In some embodiments, both Fc polypeptides contain the amino acid modifications that reduce FcγR binding (e.g., both polypeptides contain Ala at position 234 and at position 235).

[0017] In some embodiments, the Fc polypeptide dimer-antibody variable region fusion is fucose deficient or afucosylated (e.g., as described herein).

[0018] In some embodiments, the first Fc polypeptide and/or the second Fc polypeptide comprises amino acid modifications that increase serum half-life. In some embodiments, the amino acid modifications that increase serum half-life comprise (i) a Leu at position 428 and a Ser at position 434, or (ii) a Ser or Ala at position 434, according to EU numbering.

[0019] In some embodiments, the first Fc polypeptide further comprises a knob mutation T366W and the second Fc polypeptide comprises hole mutations T366S, L368A, and Y407V, according to EU numbering. In some embodiments, the first Fc polypeptide comprises the amino acid sequence of SEQ ID NO:63. In some embodiments, the second Fc polypeptide comprises the amino acid sequence of any one of SEQ ID NOS:67 and 68.

[0020] In other aspects, provided herein is an Fc polypeptide dimer-antibody variable region fusion protein, comprising (a) an antibody variable region that is capable of binding human HER2, or an antigen-binding fragment thereof; (b) a first Fc polypeptide that contains modifications that create a TfR-binding site and a knob mutation T366W, according to EU numbering, and (c) a second Fc polypeptide that comprises hole mutations T366S, L368A, and Y407V, according to EU numbering, and does not contain a TfR-binding site.

[0021] In some embodiments, the antibody variable region comprises one or more (e.g., all six) complementarity determining regions (CDRs) selected from the group consisting of: (a) a heavy chain CDR1 having at least 90% sequence identity to the amino acid sequence of SEQ ID NO:69 or having up to two amino acid substitutions relative to the amino acid sequence of SEQ ID NO:69; (b) a heavy chain CDR2 having at least 90% sequence identity to the amino acid sequence of SEQ ID NO:70 or having up to two amino acid substitutions relative to the amino acid sequence of SEQ ID NO:70; (c) a heavy chain CDR3 having at least 90% sequence identity to the amino acid sequence of SEQ ID NO:71 or having up to two amino acid substitutions relative to the amino acid sequence of SEQ ID NO:71; (d) a light chain CDR1 having at least 90% sequence identity to the amino acid sequence of SEQ ID NO:72 or having up to two amino acid substitutions relative to the amino acid sequence of SEQ ID NO:72; (e) a light chain CDR2 having up to two amino acid substitutions relative to the amino acid sequence of SEQ ID NO:73; and (f) a light chain CDR3 having up to two amino acid substitutions relative to the amino acid sequence of SEQ ID NO:74.

[0022] In some embodiments, the antibody variable region comprises one or more (e.g., all six) CDRs selected from the group consisting of: (a) a heavy chain CDR1 comprising the amino acid sequence of SEQ ID NO:69; (b) a heavy chain CDR2 comprising the amino acid sequence of SEQ ID NO:70; (c) a heavy chain CDR3 comprising the amino acid sequence of SEQ ID NO:71; (d) a light chain CDR1 comprising the amino acid sequence of SEQ ID NO:72; (e) a light chain CDR2 comprising the amino acid sequence of SEQ ID NO:73; and (f) a light chain CDR3 comprising the amino acid sequence of SEQ ID NO:74.

[0023] In some embodiments, the antibody variable region comprises two antibody heavy chain variable regions comprising the amino acid sequence of SEQ ID NO:59 and two light chain variable regions comprising the amino acid sequence of SEQ ID NO:60.

[0024] In some embodiments, the antibody variable region comprises one or more (e.g., all six) CDRs selected from the group consisting of: (a) a heavy chain CDR1 having at least 90% sequence identity to the amino acid sequence of SEQ ID NO:75 or having up to two amino acid substitutions relative to the amino acid sequence of SEQ ID NO:75; (b) a heavy chain CDR2 having at least 90% sequence identity to the amino acid sequence of SEQ ID NO:76 or having up to two amino acid substitutions relative to the amino acid sequence of SEQ ID NO:76; (c) a heavy chain CDR3 having at least 90% sequence identity to the amino acid sequence of SEQ ID NO:77 or having up to two amino acid substitutions relative to the amino acid sequence of SEQ ID NO:77; (d) a light chain CDR1 having at least 90% sequence identity to the amino acid sequence of SEQ ID NO:78 or having up to two amino acid substitutions relative to the amino acid sequence of SEQ ID NO:78; (e) a light chain CDR2 having up to two amino acid substitutions relative to the amino acid sequence of SEQ ID NO:79; and (f) a light chain CDR3 having up to two amino acid substitutions relative to the amino acid sequence of SEQ ID NO:80.

[0025] In some embodiments, the antibody variable region comprises one or more CDRs (e.g., all six) selected from the group consisting of: (a) a heavy chain CDR1 comprising the amino acid sequence of SEQ ID NO:75; (b) a heavy chain CDR2 comprising the amino acid sequence of SEQ ID NO:76; (c) a heavy chain CDR3 comprising the amino acid sequence of SEQ ID NO:77; (d) a light chain CDR1 comprising the amino acid sequence of SEQ ID NO:78; (e) a light chain CDR2 comprising the amino acid sequence of SEQ ID NO:79; and (f) a light chain CDR3 comprising the amino acid sequence of SEQ ID NO:80.

[0026] In some embodiments, the antibody variable region comprises two antibody heavy chain variable regions comprising the amino acid sequence of SEQ ID NO:61 and two light chain variable regions comprising the amino acid sequence of SEQ ID NO:62.

[0027] In some embodiments, the antibody variable region comprises one or more (e.g., all six) complementarity determining regions (CDRs) selected from the group consisting of: (a) a heavy chain CDR1 having at least 90% sequence identity to the amino acid sequence of SEQ ID NO:250 or having up to two amino acid substitutions relative to the amino acid sequence of SEQ ID NO:250; (b) a heavy chain CDR2 having at least 90% sequence identity to the amino acid sequence of SEQ ID NO:251 or having up to two amino acid substitutions relative to the amino acid sequence of SEQ ID NO:251; (c) a heavy chain CDR3 having at least 90% sequence identity to the amino acid sequence of SEQ ID NO:252 or having up to two amino acid substitutions relative to the amino acid sequence of SEQ ID NO:252; (d) a light chain CDR1 having at least 90% sequence identity to the amino acid sequence of SEQ ID NO:253 or having up to two amino acid substitutions relative to the amino acid sequence of SEQ ID NO:253; (e) a light chain CDR2 having up to two amino acid substitutions relative to the amino acid sequence of SEQ ID NO:254; and (f) a light chain CDR3 having up to two amino acid substitutions relative to the amino acid sequence of SEQ ID NO:255.

[0028] In some embodiments, the antibody variable region comprises one or more (e.g., all six) CDRs selected from the group consisting of: (a) a heavy chain CDR1 comprising the amino acid sequence of SEQ ID NO:250; (b) a heavy chain CDR2 comprising the amino acid sequence of SEQ ID NO:251; (c) a heavy chain CDR3 comprising the amino acid sequence of SEQ ID NO:252; (d) a light chain CDR1 comprising the amino acid sequence of SEQ ID NO:253; (e) a light chain CDR2 comprising the amino acid sequence of SEQ ID NO:254; and (f) a light chain CDR3 comprising the amino acid sequence of SEQ ID NO:255.

[0029] In some embodiments, the antibody variable region comprises two antibody heavy chain variable regions comprising the amino acid sequence of SEQ ID NO:256 and two light chain variable regions comprising the amino acid sequence of SEQ ID NO:257.

[0030] In some embodiments, the Fc polypeptide dimer-antibody variable region fusion protein comprises a first heavy chain comprising the amino acid sequence of any one of SEQ ID NOS:1, 9, 17, and 81. In some embodiments, the first Fc polypeptide further comprises amino acid modifications L234A and L235A. In some embodiments, the Fc polypeptide dimer-antibody variable region fusion protein comprises a first heavy chain comprising the amino acid sequence of any one of SEQ ID NOS:2, 10, 18, and 82. In some embodiments, the Fc polypeptide dimer-antibody variable region fusion protein comprises a second heavy chain comprising the amino acid sequence of SEQ ID NO:27. In some embodiments, the Fc polypeptide dimer-antibody variable region fusion protein comprises two light chains comprising the amino acid sequence of SEQ ID NO:57.

[0031] In some embodiments, the Fc polypeptide dimer-antibody variable region fusion protein comprises a first heavy chain comprising the amino acid sequence of any one of SEQ ID NOS:29, 37, 45, and 89. In some embodiments, the first Fc polypeptide further comprises amino acid modifications L234A and L235A. In some embodiments, the Fc polypeptide dimer-antibody variable region fusion protein comprises a first heavy chain comprising the amino acid sequence of any one of SEQ ID NOS:30, 38, 46, and 90. In some embodiments, the Fc polypeptide dimer-antibody variable region fusion protein comprises a second heavy chain comprising the amino acid sequence of SEQ ID NO:55. In some embodiments, the Fc polypeptide dimer-antibody variable region fusion protein comprises two light chains comprising the amino acid sequence of SEQ ID NO:58.

[0032] In some embodiments, the Fc polypeptide dimer-antibody variable region fusion protein comprises a first heavy chain comprising the amino acid sequence of any one of SEQ ID NOS:258, 266, 274, and 282. In some embodiments, the first Fc polypeptide further comprises amino acid modifications L234A and L235A. In some embodiments, the Fc polypeptide dimer-antibody variable region fusion protein comprises a first heavy chain comprising the amino acid sequence of any one of SEQ ID NOS:259, 267, 275, and 283. In some embodiments, the Fc polypeptide dimer-antibody variable region fusion protein comprises a second heavy chain comprising the amino acid sequence of SEQ ID NO:290. In some embodiments, the Fc polypeptide dimer-antibody variable region fusion protein comprises two light chains comprising the amino acid sequence of SEQ ID NO:293.

[0033] In other aspects, provided herein is an Fc polypeptide dimer-antibody variable region fusion protein, comprising: (a) an antibody variable region that is capable of binding human HER2, or an antigen-binding fragment thereof; (b) a first Fc polypeptide that contains modifications that create a TfR-binding site, a knob mutation T366W, and amino acid modification N434S with or without M428L, according to EU numbering, and (c) a second Fc polypeptide that comprises hole mutations T366S, L368A, and Y407V, according to EU numbering, and does not contain a TfR-binding site.

[0034] In some embodiments, the antibody variable region comprises one or more (e.g., all six) complementarity determining regions (CDRs) selected from the group consisting of: (a) a heavy chain CDR1 having at least 90% sequence identity to the amino acid sequence of SEQ ID NO:69 or having up to two amino acid substitutions relative to the amino acid sequence of SEQ ID NO:69; (b) a heavy chain CDR2 having at least 90% sequence identity to the amino acid sequence of SEQ ID NO:70 or having up to two amino acid substitutions relative to the amino acid sequence of SEQ ID NO:70; (c) a heavy chain CDR3 having at least 90% sequence identity to the amino acid sequence of SEQ ID NO:71 or having up to two amino acid substitutions relative to the amino acid sequence of SEQ ID NO:71; (d) a light chain CDR1 having at least 90% sequence identity to the amino acid sequence of SEQ ID NO:72 or having up to two amino acid substitutions relative to the amino acid sequence of SEQ ID NO:72; (e) a light chain CDR2 having up to two amino acid substitutions relative to the amino acid sequence of SEQ ID NO:73; and (f) a light chain CDR3 having up to two amino acid substitutions relative to the amino acid sequence of SEQ ID NO:74.

[0035] In some embodiments, the antibody variable region comprises one or more (e.g., all six) CDRs selected from the group consisting of: (a) a heavy chain CDR1 comprising the amino acid sequence of SEQ ID NO:69; (b) a heavy chain CDR2 comprising the amino acid sequence of SEQ ID NO:70; (c) a heavy chain CDR3 comprising the amino acid sequence of SEQ ID NO:71; (d) a light chain CDR1 comprising the amino acid sequence of SEQ ID NO:72; (e) a light chain CDR2 comprising the amino acid sequence of SEQ ID NO:73; and (f) a light chain CDR3 comprising the amino acid sequence of SEQ ID NO:74.

[0036] In some embodiments, the antibody variable region comprises two antibody heavy chain variable regions comprising the amino acid sequence of SEQ ID NO:59 and two light chain variable regions comprising the amino acid sequence of SEQ ID NO:60.

[0037] In some embodiments, the antibody variable region comprises one or more (e.g., all six) CDRs selected from the group consisting of: (a) a heavy chain CDR1 having at least 90% sequence identity to the amino acid sequence of SEQ ID NO:75 or having up to two amino acid substitutions relative to the amino acid sequence of SEQ ID NO:75; (b) a heavy chain CDR2 having at least 90% sequence identity to the amino acid sequence of SEQ ID NO:76 or having up to two amino acid substitutions relative to the amino acid sequence of SEQ ID NO:76; (c) a heavy chain CDR3 having at least 90% sequence identity to the amino acid sequence of SEQ ID NO:77 or having up to two amino acid substitutions relative to the amino acid sequence of SEQ ID NO:77; (d) a light chain CDR1 having at least 90% sequence identity to the amino acid sequence of SEQ ID NO:78 or having up to two amino acid substitutions relative to the amino acid sequence of SEQ ID NO:78; (e) a light chain CDR2 having up to two amino acid substitutions relative to the amino acid sequence of SEQ ID NO:79; and (f) a light chain CDR3 having up to two amino acid substitutions relative to the amino acid sequence of SEQ ID NO:80.

[0038] In some embodiments, the antibody variable region comprises one or more CDRs (e.g., all six) selected from the group consisting of: (a) a heavy chain CDR1 comprising the amino acid sequence of SEQ ID NO:75; (b) a heavy chain CDR2 comprising the amino acid sequence of SEQ ID NO:76; (c) a heavy chain CDR3 comprising the amino acid sequence of SEQ ID NO:77; (d) a light chain CDR1 comprising the amino acid sequence of SEQ ID NO:78; (e) a light chain CDR2 comprising the amino acid sequence of SEQ ID NO:79; and (f) a light chain CDR3 comprising the amino acid sequence of SEQ ID NO:80.

[0039] In some embodiments, the antibody variable region comprises two antibody heavy chain variable regions comprising the amino acid sequence of SEQ ID NO:61 and two light chain variable regions comprising the amino acid sequence of SEQ ID NO:62.

[0040] In some embodiments, the antibody variable region comprises one or more (e.g., all six) complementarity determining regions (CDRs) selected from the group consisting of: (a) a heavy chain CDR1 having at least 90% sequence identity to the amino acid sequence of SEQ ID NO:250 or having up to two amino acid substitutions relative to the amino acid sequence of SEQ ID NO:250; (b) a heavy chain CDR2 having at least 90% sequence identity to the amino acid sequence of SEQ ID NO:251 or having up to two amino acid substitutions relative to the amino acid sequence of SEQ ID NO:251; (c) a heavy chain CDR3 having at least 90% sequence identity to the amino acid sequence of SEQ ID NO:252 or having up to two amino acid substitutions relative to the amino acid sequence of SEQ ID NO:252; (d) a light chain CDR1 having at least 90% sequence identity to the amino acid sequence of SEQ ID NO:253 or having up to two amino acid substitutions relative to the amino acid sequence of SEQ ID NO:253; (e) a light chain CDR2 having up to two amino acid substitutions relative to the amino acid sequence of SEQ ID NO:254; and (f) a light chain CDR3 having up to two amino acid substitutions relative to the amino acid sequence of SEQ ID NO:255.

[0041] In some embodiments, the antibody variable region comprises one or more (e.g., all six) CDRs selected from the group consisting of: (a) a heavy chain CDR1 comprising the amino acid sequence of SEQ ID NO:250; (b) a heavy chain CDR2 comprising the amino acid sequence of SEQ ID NO:251; (c) a heavy chain CDR3 comprising the amino acid sequence of SEQ ID NO:252; (d) a light chain CDR1 comprising the amino acid sequence of SEQ ID NO:253; (e) a light chain CDR2 comprising the amino acid sequence of SEQ ID NO:254; and (f) a light chain CDR3 comprising the amino acid sequence of SEQ ID NO:255.

[0042] In some embodiments, the antibody variable region comprises two antibody heavy chain variable regions comprising the amino acid sequence of SEQ ID NO:256 and two light chain variable regions comprising the amino acid sequence of SEQ ID NO:257.

[0043] In some embodiments, the Fc polypeptide dimer-antibody variable region fusion protein comprises a first heavy chain comprising the amino acid sequence of any one of SEQ ID NOS:3, 11, 19, and 83. In some embodiments, the first Fc polypeptide further comprises amino acid modifications L234A and L235A. In some embodiments, the Fc polypeptide dimer-antibody variable region fusion protein comprises a first heavy chain comprising the amino acid sequence of any one of SEQ ID NOS:4, 12, 20, and 84. In some embodiments, the Fc polypeptide dimer-antibody variable region fusion protein comprises a second heavy chain comprising the amino acid sequence of SEQ ID NO:27. In some embodiments, the Fc polypeptide dimer-antibody variable region fusion protein comprises two light chains comprising the amino acid sequence of SEQ ID NO:57.

[0044] In some embodiments, the Fc polypeptide dimer-antibody variable region fusion protein comprises a first heavy chain comprising the amino acid sequence of any one of SEQ ID NOS:31, 39, 47, and 91. In some embodiments, the first Fc polypeptide further comprises amino acid modifications L234A and L235A. In some embodiments, the Fc polypeptide dimer-antibody variable region fusion protein comprises a first heavy chain comprising the amino acid sequence of any one of SEQ ID NOS:32, 40, 48, and 92. In some embodiments, the Fc polypeptide dimer-antibody variable region fusion protein comprises a second heavy chain comprising the amino acid sequence of SEQ ID NO:55. In some embodiments, the Fc polypeptide dimer-antibody variable region fusion protein comprises two light chains comprising the amino acid sequence of SEQ ID NO:58.

[0045] In some embodiments, the Fc polypeptide dimer-antibody variable region fusion protein comprises a first heavy chain comprising the amino acid sequence of any one of SEQ ID NOS:260, 268, 276, and 284. In some embodiments, the first Fc polypeptide further comprises amino acid modifications L234A and L235A. In some embodiments, the Fc polypeptide dimer-antibody variable region fusion protein comprises a first heavy chain comprising the amino acid sequence of any one of SEQ ID NOS:261, 269, 277, and 285. In some embodiments, the Fc polypeptide dimer-antibody variable region fusion protein comprises a second heavy chain comprising the amino acid sequence of SEQ ID NO:290. In some embodiments, the Fc polypeptide dimer-antibody variable region fusion protein comprises two light chains comprising the amino acid sequence of SEQ ID NO:293.

[0046] In other aspects, provided herein is an Fc polypeptide dimer-antibody variable region fusion protein, comprising: (a) an antibody variable region that is capable of binding human HER2, or an antigen-binding fragment thereof; (b) a first Fc polypeptide that contains modifications that create a TfR-binding site and a knob mutation T366W, according to EU numbering, and (c) a second Fc polypeptide that comprises hole mutations T366S, L368A, and Y407V and amino acid modification N434S with or without M428L, according to EU numbering, and does not contain a TfR-binding site.

[0047] In some embodiments, the antibody variable region comprises one or more (e.g., all six) complementarity determining regions (CDRs) selected from the group consisting of: (a) a heavy chain CDR1 having at least 90% sequence identity to the amino acid sequence of SEQ ID NO:69 or having up to two amino acid substitutions relative to the amino acid sequence of SEQ ID NO:69; (b) a heavy chain CDR2 having at least 90% sequence identity to the amino acid sequence of SEQ ID NO:70 or having up to two amino acid substitutions relative to the amino acid sequence of SEQ ID NO:70; (c) a heavy chain CDR3 having at least 90% sequence identity to the amino acid sequence of SEQ ID NO:71 or having up to two amino acid substitutions relative to the amino acid sequence of SEQ ID NO:71; (d) a light chain CDR1 having at least 90% sequence identity to the amino acid sequence of SEQ ID NO:72 or having up to two amino acid substitutions relative to the amino acid sequence of SEQ ID NO:72; (e) a light chain CDR2 having up to two amino acid substitutions relative to the amino acid sequence of SEQ ID NO:73; and (f) a light chain CDR3 having up to two amino acid substitutions relative to the amino acid sequence of SEQ ID NO:74.

[0048] In some embodiments, the antibody variable region comprises one or more (e.g., all six) CDRs selected from the group consisting of: (a) a heavy chain CDR1 comprising the amino acid sequence of SEQ ID NO:69; (b) a heavy chain CDR2 comprising the amino acid sequence of SEQ ID NO:70; (c) a heavy chain CDR3 comprising the amino acid sequence of SEQ ID NO:71; (d) a light chain CDR1 comprising the amino acid sequence of SEQ ID NO:72; (e) a light chain CDR2 comprising the amino acid sequence of SEQ ID NO:73; and (f) a light chain CDR3 comprising the amino acid sequence of SEQ ID NO:74.

[0049] In some embodiments, the antibody variable region comprises two antibody heavy chain variable regions comprising the amino acid sequence of SEQ ID NO:59 and two light chain variable regions comprising the amino acid sequence of SEQ ID NO:60.

[0050] In some embodiments, the antibody variable region comprises one or more (e.g., all six) CDRs selected from the group consisting of: (a) a heavy chain CDR1 having at least 90% sequence identity to the amino acid sequence of SEQ ID NO:75 or having up to two amino acid substitutions relative to the amino acid sequence of SEQ ID NO:75; (b) a heavy chain CDR2 having at least 90% sequence identity to the amino acid sequence of SEQ ID NO:76 or having up to two amino acid substitutions relative to the amino acid sequence of SEQ ID NO:76; (c) a heavy chain CDR3 having at least 90% sequence identity to the amino acid sequence of SEQ ID NO:77 or having up to two amino acid substitutions relative to the amino acid sequence of SEQ ID NO:77; (d) a light chain CDR1 having at least 90% sequence identity to the amino acid sequence of SEQ ID NO:78 or having up to two amino acid substitutions relative to the amino acid sequence of SEQ ID NO:78; (e) a light chain CDR2 having up to two amino acid substitutions relative to the amino acid sequence of SEQ ID NO:79; and (f) a light chain CDR3 having up to two amino acid substitutions relative to the amino acid sequence of SEQ ID NO:80.

[0051] In some embodiments, the antibody variable region comprises one or more CDRs (e.g., all six) selected from the group consisting of: (a) a heavy chain CDR1 comprising the amino acid sequence of SEQ ID NO:75; (b) a heavy chain CDR2 comprising the amino acid sequence of SEQ ID NO:76; (c) a heavy chain CDR3 comprising the amino acid sequence of SEQ ID NO:77; (d) a light chain CDR1 comprising the amino acid sequence of SEQ ID NO:78; (e) a light chain CDR2 comprising the amino acid sequence of SEQ ID NO:79; and (f) a light chain CDR3 comprising the amino acid sequence of SEQ ID NO:80.

[0052] In some embodiments, the antibody variable region comprises two antibody heavy chain variable regions comprising the amino acid sequence of SEQ ID NO:61 and two light chain variable regions comprising the amino acid sequence of SEQ ID NO:62.

[0053] In some embodiments, the antibody variable region comprises one or more (e.g., all six) complementarity determining regions (CDRs) selected from the group consisting of: (a) a heavy chain CDR1 having at least 90% sequence identity to the amino acid sequence of SEQ ID NO:250 or having up to two amino acid substitutions relative to the amino acid sequence of SEQ ID NO:250; (b) a heavy chain CDR2 having at least 90% sequence identity to the amino acid sequence of SEQ ID NO:251 or having up to two amino acid substitutions relative to the amino acid sequence of SEQ ID NO:251; (c) a heavy chain CDR3 having at least 90% sequence identity to the amino acid sequence of SEQ ID NO:252 or having up to two amino acid substitutions relative to the amino acid sequence of SEQ ID NO:252; (d) a light chain CDR1 having at least 90% sequence identity to the amino acid sequence of SEQ ID NO:253 or having up to two amino acid substitutions relative to the amino acid sequence of SEQ ID NO:253; (e) a light chain CDR2 having up to two amino acid substitutions relative to the amino acid sequence of SEQ ID NO:254; and (f) a light chain CDR3 having up to two amino acid substitutions relative to the amino acid sequence of SEQ ID NO:255.

[0054] In some embodiments, the antibody variable region comprises one or more (e.g., all six) CDRs selected from the group consisting of: (a) a heavy chain CDR1 comprising the amino acid sequence of SEQ ID NO:250; (b) a heavy chain CDR2 comprising the amino acid sequence of SEQ ID NO:251; (c) a heavy chain CDR3 comprising the amino acid sequence of SEQ ID NO:252; (d) a light chain CDR1 comprising the amino acid sequence of SEQ ID NO:253; (e) a light chain CDR2 comprising the amino acid sequence of SEQ ID NO:254; and (f) a light chain CDR3 comprising the amino acid sequence of SEQ ID NO:255.

[0055] In some embodiments, the antibody variable region comprises two antibody heavy chain variable regions comprising the amino acid sequence of SEQ ID NO:256 and two light chain variable regions comprising the amino acid sequence of SEQ ID NO:257.

[0056] In some embodiments, the Fc polypeptide dimer-antibody variable region fusion protein comprises a first heavy chain comprising the amino acid sequence of any one of SEQ ID NOS:1, 9, 17, and 81. In some embodiments, the first Fc polypeptide further comprises amino acid modifications L234A and L235A. In some embodiments, the Fc polypeptide dimer-antibody variable region fusion protein comprises a first heavy chain comprising the amino acid sequence of any one of SEQ ID NOS:2, 10, 18, and 82. In some embodiments, the Fc polypeptide dimer-antibody variable region fusion protein comprises a second heavy chain comprising the amino acid sequence of SEQ ID NO:28. In some embodiments, the Fc polypeptide dimer-antibody variable region fusion protein comprises two light chains comprising the amino acid sequence of SEQ ID NO:57.

[0057] In some embodiments, the Fc polypeptide dimer-antibody variable region fusion protein comprises a first heavy chain comprising the amino acid sequence of any one of SEQ ID NOS:29, 37, 45, and 89. In some embodiments, the first Fc polypeptide further comprises amino acid modifications L234A and L235A. In some embodiments, the Fc polypeptide dimer-antibody variable region fusion protein comprises a first heavy chain comprising the amino acid sequence of any one of SEQ ID NOS:30, 38, 46, and 90. In some embodiments, the Fc polypeptide dimer-antibody variable region fusion protein comprises a second heavy chain comprising the amino acid sequence of SEQ ID NO:56. In some embodiments, the Fc polypeptide dimer-antibody variable region fusion protein comprises two light chains comprising the amino acid sequence of SEQ ID NO:58.

[0058] In some embodiments, the Fc polypeptide dimer-antibody variable region fusion protein comprises a first heavy chain comprising the amino acid sequence of any one of SEQ ID NOS:258, 266, 274, and 282. In some embodiments, the first Fc polypeptide further comprises amino acid modifications L234A and L235A. In some embodiments, the Fc polypeptide dimer-antibody variable region fusion protein comprises a first heavy chain comprising the amino acid sequence of any one of SEQ ID NOS:259, 267, 275, and 283. In some embodiments, the Fc polypeptide dimer-antibody variable region fusion protein comprises a second heavy chain comprising the amino acid sequence of SEQ ID NO:291. In some embodiments, the Fc polypeptide dimer-antibody variable region fusion protein comprises two light chains comprising the amino acid sequence of SEQ ID NO:293.

[0059] In other aspects, provided herein is an Fc polypeptide dimer-antibody variable region fusion protein, comprising: (a) an antibody variable region that is capable of binding human HER2, or an antigen-binding fragment thereof; (b) a first Fc polypeptide that contains modifications that create a TfR-binding site, a knob mutation T366W, and amino acid modification N434S with or without M428L, according to EU numbering, and (c) a second Fc polypeptide that comprises hole mutations T366S, L368A, and Y407V and amino acid modification N434S with or without M428L, according to EU numbering, and does not contain a TfR-binding site.

[0060] In some embodiments, the antibody variable region comprises one or more (e.g., all six) complementarity determining regions (CDRs) selected from the group consisting of: (a) a heavy chain CDR1 having at least 90% sequence identity to the amino acid sequence of SEQ ID NO:69 or having up to two amino acid substitutions relative to the amino acid sequence of SEQ ID NO:69; (b) a heavy chain CDR2 having at least 90% sequence identity to the amino acid sequence of SEQ ID NO:70 or having up to two amino acid substitutions relative to the amino acid sequence of SEQ ID NO:70; (c) a heavy chain CDR3 having at least 90% sequence identity to the amino acid sequence of SEQ ID NO:71 or having up to two amino acid substitutions relative to the amino acid sequence of SEQ ID NO:71; (d) a light chain CDR1 having at least 90% sequence identity to the amino acid sequence of SEQ ID NO:72 or having up to two amino acid substitutions relative to the amino acid sequence of SEQ ID NO:72; (e) a light chain CDR2 having up to two amino acid substitutions relative to the amino acid sequence of SEQ ID NO:73; and (f) a light chain CDR3 having up to two amino acid substitutions relative to the amino acid sequence of SEQ ID NO:74.

[0061] In some embodiments, the antibody variable region comprises one or more (e.g., all six) CDRs selected from the group consisting of: (a) a heavy chain CDR1 comprising the amino acid sequence of SEQ ID NO:69; (b) a heavy chain CDR2 comprising the amino acid sequence of SEQ ID NO:70; (c) a heavy chain CDR3 comprising the amino acid sequence of SEQ ID NO:71; (d) a light chain CDR1 comprising the amino acid sequence of SEQ ID NO:72; (e) a light chain CDR2 comprising the amino acid sequence of SEQ ID NO:73; and (f) a light chain CDR3 comprising the amino acid sequence of SEQ ID NO:74.

[0062] In some embodiments, the antibody variable region comprises two antibody heavy chain variable regions comprising the amino acid sequence of SEQ ID NO:59 and two light chain variable regions comprising the amino acid sequence of SEQ ID NO:60.

[0063] In some embodiments, the antibody variable region comprises one or more (e.g., all six) CDRs selected from the group consisting of: (a) a heavy chain CDR1 having at least 90% sequence identity to the amino acid sequence of SEQ ID NO:75 or having up to two amino acid substitutions relative to the amino acid sequence of SEQ ID NO:75; (b) a heavy chain CDR2 having at least 90% sequence identity to the amino acid sequence of SEQ ID NO:76 or having up to two amino acid substitutions relative to the amino acid sequence of SEQ ID NO:76; (c) a heavy chain CDR3 having at least 90% sequence identity to the amino acid sequence of SEQ ID NO:77 or having up to two amino acid substitutions relative to the amino acid sequence of SEQ ID NO:77; (d) a light chain CDR1 having at least 90% sequence identity to the amino acid sequence of SEQ ID NO:78 or having up to two amino acid substitutions relative to the amino acid sequence of SEQ ID NO:78; (e) a light chain CDR2 having up to two amino acid substitutions relative to the amino acid sequence of SEQ ID NO:79; and (f) a light chain CDR3 having up to two amino acid substitutions relative to the amino acid sequence of SEQ ID NO:80.

[0064] In some embodiments, the antibody variable region comprises one or more CDRs (e.g., all six) selected from the group consisting of: (a) a heavy chain CDR1 comprising the amino acid sequence of SEQ ID NO:75; (b) a heavy chain CDR2 comprising the amino acid sequence of SEQ ID NO:76; (c) a heavy chain CDR3 comprising the amino acid sequence of SEQ ID NO:77; (d) a light chain CDR1 comprising the amino acid sequence of SEQ ID NO:78; (e) a light chain CDR2 comprising the amino acid sequence of SEQ ID NO:79; and (f) a light chain CDR3 comprising the amino acid sequence of SEQ ID NO:80.

[0065] In some embodiments, the antibody variable region comprises two antibody heavy chain variable regions comprising the amino acid sequence of SEQ ID NO:61 and two light chain variable regions comprising the amino acid sequence of SEQ ID NO:62.

[0066] In some embodiments, the antibody variable region comprises one or more (e.g., all six) complementarity determining regions (CDRs) selected from the group consisting of: (a) a heavy chain CDR1 having at least 90% sequence identity to the amino acid sequence of SEQ ID NO:250 or having up to two amino acid substitutions relative to the amino acid sequence of SEQ ID NO:250; (b) a heavy chain CDR2 having at least 90% sequence identity to the amino acid sequence of SEQ ID NO:251 or having up to two amino acid substitutions relative to the amino acid sequence of SEQ ID NO:251; (c) a heavy chain CDR3 having at least 90% sequence identity to the amino acid sequence of SEQ ID NO:252 or having up to two amino acid substitutions relative to the amino acid sequence of SEQ ID NO:252; (d) a light chain CDR1 having at least 90% sequence identity to the amino acid sequence of SEQ ID NO:253 or having up to two amino acid substitutions relative to the amino acid sequence of SEQ ID NO:253; (e) a light chain CDR2 having up to two amino acid substitutions relative to the amino acid sequence of SEQ ID NO:254; and (f) a light chain CDR3 having up to two amino acid substitutions relative to the amino acid sequence of SEQ ID NO:255.

[0067] In some embodiments, the antibody variable region comprises one or more (e.g., all six) CDRs selected from the group consisting of: (a) a heavy chain CDR1 comprising the amino acid sequence of SEQ ID NO:250; (b) a heavy chain CDR2 comprising the amino acid sequence of SEQ ID NO:251; (c) a heavy chain CDR3 comprising the amino acid sequence of SEQ ID NO:252; (d) a light chain CDR1 comprising the amino acid sequence of SEQ ID NO:253; (e) a light chain CDR2 comprising the amino acid sequence of SEQ ID NO:254; and (f) a light chain CDR3 comprising the amino acid sequence of SEQ ID NO:255.

[0068] In some embodiments, the antibody variable region comprises two antibody heavy chain variable regions comprising the amino acid sequence of SEQ ID NO:256 and two light chain variable regions comprising the amino acid sequence of SEQ ID NO:257.

[0069] In some embodiments, the Fc polypeptide dimer-antibody variable region fusion protein comprises a first heavy chain comprising the amino acid sequence of any one of SEQ ID NOS:3, 11, 19, and 83. In some embodiments, the first Fc polypeptide further comprises amino acid modifications L234A and L235A. In some embodiments, the Fc polypeptide dimer-antibody variable region fusion protein comprises a first heavy chain comprising the amino acid sequence of any one of SEQ ID NOS:4, 12, 20, and 84. In some embodiments, the Fc polypeptide dimer-antibody variable region fusion protein comprises a second heavy chain comprising the amino acid sequence of SEQ ID NO:28. In some embodiments, the Fc polypeptide dimer-antibody variable region fusion protein comprises two light chains comprising the amino acid sequence of SEQ ID NO:57.

[0070] In some embodiments, the Fc polypeptide dimer-antibody variable region fusion protein comprises a first heavy chain comprising the amino acid sequence of any one of SEQ ID NOS:31, 39, 47, and 91. In some embodiments, the first Fc polypeptide further comprises amino acid modifications L234A and L235A. In some embodiments, the Fc polypeptide dimer-antibody variable region fusion protein comprises a first heavy chain comprising the amino acid sequence of any one of SEQ ID NOS:32, 40, 48, and 92. In some embodiments, the Fc polypeptide dimer-antibody variable region fusion protein comprises a second heavy chain comprising the amino acid sequence of SEQ ID NO:56. In some embodiments, the Fc polypeptide dimer-antibody variable region fusion protein comprises two light chains comprising the amino acid sequence of SEQ ID NO:58.

[0071] In some embodiments, the Fc polypeptide dimer-antibody variable region fusion protein comprises a first heavy chain comprising the amino acid sequence of any one of SEQ ID NOS:260, 268, 276, and 284. In some embodiments, the first Fc polypeptide further comprises amino acid modifications L234A and L235A. In some embodiments, the Fc polypeptide dimer-antibody variable region fusion protein comprises a first heavy chain comprising the amino acid sequence of any one of SEQ ID NOS:261, 269, 277, and 285. In some embodiments, the Fc polypeptide dimer-antibody variable region fusion protein comprises a second heavy chain comprising the amino acid sequence of SEQ ID NO:291. In some embodiments, the Fc polypeptide dimer-antibody variable region fusion protein comprises two light chains comprising the amino acid sequence of SEQ ID NO:293.

[0072] In some embodiments, the modified Fc polypeptide dimer does not substantially deplete reticulocytes. In some embodiments, an amount of reticulocytes depleted after administering the Fc polypeptide dimer-antibody variable region fusion protein is less than an amount of reticulocytes depleted after administering a control. In some embodiments, the control is a corresponding TfR-binding polypeptide dimer-antibody variable region fusion protein with full effector function and/or contains no mutations that reduce FcγR binding.

[0073] In other aspects, provided herein is an antibody heavy chain comprising: (a) an anti-human HER2 antibody heavy chain variable region, or a fragment thereof, and (b) a modified Fc polypeptide that contains modifications that create a TfR-binding site. In some embodiments, the modified Fc polypeptide includes one or more amino acid modifications that reduce FcγR binding when bound to TfR.

[0074] In some embodiments, the antibody heavy chain variable region comprises one or more CDRs selected from the group consisting of: (a) a heavy chain CDR1 having at least 90% sequence identity to the amino acid sequence of SEQ ID NO:69 or having up to two amino acid substitutions relative to the amino acid sequence of SEQ ID NO:69; (b) a heavy chain CDR2 having at least 90% sequence identity to the amino acid sequence of SEQ ID NO:70 or having up to two amino acid substitutions relative to the amino acid sequence of SEQ ID NO:70; and (c) a heavy chain CDR3 having at least 90% sequence identity to the amino acid sequence of SEQ ID NO:71 or having up to two amino acid substitutions relative to the amino acid sequence of SEQ ID NO:71. In some embodiments, the antibody heavy chain variable region comprises one or more CDRs selected from the group consisting of: (a) a heavy chain CDR1 comprising the amino acid sequence of SEQ ID NO:69; (b) a heavy chain CDR2 comprising the amino acid sequence of SEQ ID NO:70; and (c) a heavy chain CDR3 comprising the amino acid sequence of SEQ ID NO:71. In some embodiments, the antibody heavy chain variable region comprises the amino acid sequence of SEQ ID NO:59.

[0075] In some embodiments, the antibody variable region comprises one or more CDRs selected from the group consisting of: (a) a heavy chain CDR1 having at least 90% sequence identity to the amino acid sequence of SEQ ID NO:75 or having up to two amino acid substitutions relative to the amino acid sequence of SEQ ID NO:75; (b) a heavy chain CDR2 having at least 90% sequence identity to the amino acid sequence of SEQ ID NO:76 or having up to two amino acid substitutions relative to the amino acid sequence of SEQ ID NO:76; and (c) a heavy chain CDR3 having at least 90% sequence identity to the amino acid sequence of SEQ ID NO:77 or having up to two amino acid substitutions relative to the amino acid sequence of SEQ ID NO:77. In some embodiments, the antibody variable region comprises one or more CDRs selected from the group consisting of: (a) a heavy chain CDR1 comprising the amino acid sequence of SEQ ID NO:75; (b) a heavy chain CDR2 comprising the amino acid sequence of SEQ ID NO:76; and (c) a heavy chain CDR3 comprising the amino acid sequence of SEQ ID NO:77. In some embodiments, the antibody heavy chain variable region comprises the amino acid sequence of SEQ ID NO:61.

[0076] In some embodiments, the antibody variable region comprises one or more CDRs selected from the group consisting of: (a) a heavy chain CDR1 having at least 90% sequence identity to the amino acid sequence of SEQ ID NO:250 or having up to two amino acid substitutions relative to the amino acid sequence of SEQ ID NO:250; (b) a heavy chain CDR2 having at least 90% sequence identity to the amino acid sequence of SEQ ID NO:251 or having up to two amino acid substitutions relative to the amino acid sequence of SEQ ID NO:251; and (c) a heavy chain CDR3 having at least 90% sequence identity to the amino acid sequence of SEQ ID NO:252 or having up to two amino acid substitutions relative to the amino acid sequence of SEQ ID NO:252. In some embodiments, the antibody variable region comprises one or more CDRs selected from the group consisting of: (a) a heavy chain CDR1 comprising the amino acid sequence of SEQ ID NO:250; (b) a heavy chain CDR2 comprising the amino acid sequence of SEQ ID NO:251; and (c) a heavy chain CDR3 comprising the amino acid sequence of SEQ ID NO:252. In some embodiments, the antibody heavy chain variable region comprises the amino acid sequence of SEQ ID NO:256.

[0077] In some embodiments, the TfR-binding site is within a modified CH3 domain. In some embodiments, the modified CH3 domain is derived from a human IgG1, IgG2, IgG3, or IgG4 CH3 domain. In some embodiments, the modified CH3 domain comprises one, two, three, four, five, six, seven, eight, nine, ten, or eleven substitutions in a set of amino acid positions comprising 380, 384, 386, 387, 388, 389, 390, 413, 415, 416, and 421, according to EU numbering. In some embodiments, the modified CH3 domain comprises Glu, Leu, Ser, Val, Trp, Tyr, or Gln at position 380; Leu, Tyr, Phe, Trp, Met, Pro, or Val at position 384; Leu, Thr, His, Pro, Asn, Val, or Phe at position 386; Val, Pro, Ile, or an acidic amino acid at position 387; Trp at position 388; an aliphatic amino acid, Gly, Ser, Thr, or Asn at position 389; Gly, His, Gln, Leu, Lys, Val, Phe, Ser, Ala, Asp, Glu, Asn, Arg, or Thr at position 390; an acidic amino acid, Ala, Ser, Leu, Thr, Pro, Ile, or His at position 413; Glu, Ser, Asp, Gly, Thr, Pro, Gln, or Arg at position 415; Thr, Arg, Asn, or an acidic amino acid at position 416; and/or an aromatic amino acid, His, or Lys at position 421, according to EU numbering.

[0078] In some embodiments, the amino acid modifications that reduce FcγR binding when bound to TfR comprise Ala at position 234 and at position 235, according to EU numbering. In some embodiments, the modified Fc polypeptide further comprises amino acid modifications that increase serum half-life. In some embodiments, the amino acid modifications that increase serum half-life comprise (i) a Leu at position 428 and a Ser at position 434, or (ii) a Ser or Ala at position 434, according to EU numbering. In some embodiments, the modified Fc polypeptide further comprises a knob mutation T366W, according to EU numbering. In some embodiments, the modified Fc polypeptide comprises the amino acid sequence of SEQ ID NO:63.

[0079] In other aspects, provided herein is an antibody heavy chain comprising: (a) an anti-human HER2 antibody heavy chain variable region, or a fragment thereof, and (b) a modified Fc polypeptide that contains modifications that create a TfR-binding site and a knob mutation T366W, according to EU numbering.

[0080] In some embodiments, the antibody heavy chain variable region comprises one or more CDRs selected from the group consisting of: (a) a heavy chain CDR1 having at least 90% sequence identity to the amino acid sequence of SEQ ID NO:69 or having up to two amino acid substitutions relative to the amino acid sequence of SEQ ID NO:69; (b) a heavy chain CDR2 having at least 90% sequence identity to the amino acid sequence of SEQ ID NO:70 or having up to two amino acid substitutions relative to the amino acid sequence of SEQ ID NO:70; and (c) a heavy chain CDR3 having at least 90% sequence identity to the amino acid sequence of SEQ ID NO:71 or having up to two amino acid substitutions relative to the amino acid sequence of SEQ ID NO:71. In some embodiments, the antibody heavy chain variable region comprises one or more CDRs selected from the group consisting of: (a) a heavy chain CDR1 comprising the amino acid sequence of SEQ ID NO:69; (b) a heavy chain CDR2 comprising the amino acid sequence of SEQ ID NO:70; and (c) a heavy chain CDR3 comprising the amino acid sequence of SEQ ID NO:71. In some embodiments, the antibody heavy chain variable region comprises the amino acid sequence of SEQ ID NO:59.

[0081] In some embodiments, the antibody variable region comprises one or more CDRs selected from the group consisting of: (a) a heavy chain CDR1 having at least 90% sequence identity to the amino acid sequence of SEQ ID NO:75 or having up to two amino acid substitutions relative to the amino acid sequence of SEQ ID NO:75; (b) a heavy chain CDR2 having at least 90% sequence identity to the amino acid sequence of SEQ ID NO:76 or having up to two amino acid substitutions relative to the amino acid sequence of SEQ ID NO:76; and (c) a heavy chain CDR3 having at least 90% sequence identity to the amino acid sequence of SEQ ID NO:77 or having up to two amino acid substitutions relative to the amino acid sequence of SEQ ID NO:77. In some embodiments, the antibody variable region comprises one or more CDRs selected from the group consisting of: (a) a heavy chain CDR1 comprising the amino acid sequence of SEQ ID NO:75; (b) a heavy chain CDR2 comprising the amino acid sequence of SEQ ID NO:76; and (c) a heavy chain CDR3 comprising the amino acid sequence of SEQ ID NO:77. In some embodiments, the antibody heavy chain variable region comprises the amino acid sequence of SEQ ID NO:61.

[0082] In some embodiments, the antibody variable region comprises one or more CDRs selected from the group consisting of: (a) a heavy chain CDR1 having at least 90% sequence identity to the amino acid sequence of SEQ ID NO:250 or having up to two amino acid substitutions relative to the amino acid sequence of SEQ ID NO:250; (b) a heavy chain CDR2 having at least 90% sequence identity to the amino acid sequence of SEQ ID NO:251 or having up to two amino acid substitutions relative to the amino acid sequence of SEQ ID NO:251; and (c) a heavy chain CDR3 having at least 90% sequence identity to the amino acid sequence of SEQ ID NO:252 or having up to two amino acid substitutions relative to the amino acid sequence of SEQ ID NO:252. In some embodiments, the antibody variable region comprises one or more CDRs selected from the group consisting of: (a) a heavy chain CDR1 comprising the amino acid sequence of SEQ ID NO:250; (b) a heavy chain CDR2 comprising the amino acid sequence of SEQ ID NO:251; and (c) a heavy chain CDR3 comprising the amino acid sequence of SEQ ID NO:252. In some embodiments, the antibody heavy chain variable region comprises the amino acid sequence of SEQ ID NO:256.

[0083] In some embodiments, the antibody heavy chain comprises the amino acid sequence of any one of SEQ ID NOS:1, 9, 17, and 81. In some embodiments, the antibody heavy chain comprises the amino acid sequence of any one of SEQ ID NOS:29, 37, 45, and 89. In some embodiments, the antibody heavy chain comprises the amino acid sequence of any one of SEQ ID NOS:258, 266, 274, and 282. In some embodiments, the modified Fc polypeptide further comprises amino acid modifications L234A and L235A. In some embodiments, the antibody heavy chain comprises the amino acid sequence of any one of SEQ ID NOS:2, 10, 18, and 82. In some embodiments, the antibody heavy chain comprises the amino acid sequence of any one of SEQ ID NOS:30, 38, 46, and 90. In some embodiments, the antibody heavy chain comprises the amino acid sequence of any one of SEQ ID NOS:259, 267, 275, and 283.

[0084] In other aspects, provided herein is an antibody heavy chain comprising: (a) an anti-human HER2 antibody heavy chain variable region, or a fragment thereof, and (b) a modified Fc polypeptide that contains modifications that create a TfR-binding site, a knob mutation T366W, and amino acid modification N434S with or without M428L, according to EU numbering.

[0085] In some embodiments, the antibody heavy chain variable region comprises one or more CDRs selected from the group consisting of: (a) a heavy chain CDR1 having at least 90% sequence identity to the amino acid sequence of SEQ ID NO:69 or having up to two amino acid substitutions relative to the amino acid sequence of SEQ ID NO:69; (b) a heavy chain CDR2 having at least 90% sequence identity to the amino acid sequence of SEQ ID NO:70 or having up to two amino acid substitutions relative to the amino acid sequence of SEQ ID NO:70; and (c) a heavy chain CDR3 having at least 90% sequence identity to the amino acid sequence of SEQ ID NO:71 or having up to two amino acid substitutions relative to the amino acid sequence of SEQ ID NO:71. In some embodiments, the antibody heavy chain variable region comprises one or more CDRs selected from the group consisting of: (a) a heavy chain CDR1 comprising the amino acid sequence of SEQ ID NO:69; (b) a heavy chain CDR2 comprising the amino acid sequence of SEQ ID NO:70; and (c) a heavy chain CDR3 comprising the amino acid sequence of SEQ ID NO:71. In some embodiments, the antibody heavy chain variable region comprises the amino acid sequence of SEQ ID NO:59.

[0086] In some embodiments, the antibody variable region comprises one or more CDRs selected from the group consisting of: (a) a heavy chain CDR1 having at least 90% sequence identity to the amino acid sequence of SEQ ID NO:75 or having up to two amino acid substitutions relative to the amino acid sequence of SEQ ID NO:75; (b) a heavy chain CDR2 having at least 90% sequence identity to the amino acid sequence of SEQ ID NO:76 or having up to two amino acid substitutions relative to the amino acid sequence of SEQ ID NO:76; and (c) a heavy chain CDR3 having at least 90% sequence identity to the amino acid sequence of SEQ ID NO:77 or having up to two amino acid substitutions relative to the amino acid sequence of SEQ ID NO:77. In some embodiments, the antibody variable region comprises one or more CDRs selected from the group consisting of: (a) a heavy chain CDR1 comprising the amino acid sequence of SEQ ID NO:75; (b) a heavy chain CDR2 comprising the amino acid sequence of SEQ ID NO:76; and (c) a heavy chain CDR3 comprising the amino acid sequence of SEQ ID NO:77. In some embodiments, the antibody heavy chain variable region comprises the amino acid sequence of SEQ ID NO:61.

[0087] In some embodiments, the antibody variable region comprises one or more CDRs selected from the group consisting of: (a) a heavy chain CDR1 having at least 90% sequence identity to the amino acid sequence of SEQ ID NO:250 or having up to two amino acid substitutions relative to the amino acid sequence of SEQ ID NO:250; (b) a heavy chain CDR2 having at least 90% sequence identity to the amino acid sequence of SEQ ID NO:251 or having up to two amino acid substitutions relative to the amino acid sequence of SEQ ID NO:251; and (c) a heavy chain CDR3 having at least 90% sequence identity to the amino acid sequence of SEQ ID NO:252 or having up to two amino acid substitutions relative to the amino acid sequence of SEQ ID NO:252. In some embodiments, the antibody variable region comprises one or more CDRs selected from the group consisting of: (a) a heavy chain CDR1 comprising the amino acid sequence of SEQ ID NO:250; (b) a heavy chain CDR2 comprising the amino acid sequence of SEQ ID NO:251; and (c) a heavy chain CDR3 comprising the amino acid sequence of SEQ ID NO:252. In some embodiments, the antibody heavy chain variable region comprises the amino acid sequence of SEQ ID NO:256.

[0088] In some embodiments, the antibody heavy chain comprises the amino acid sequence of any one of SEQ ID NOS:3, 11, 19, and 83. In some embodiments, the antibody heavy chain comprises the amino acid sequence of any one of SEQ ID NOS:31, 39, 47, and 91. In some embodiments, the antibody heavy chain comprises the amino acid sequence of any one of SEQ ID NOS:260, 268, 276, and 284. In some embodiments, the modified Fc polypeptide further comprises amino acid modifications L234A and L235A. In some embodiments, the antibody heavy chain comprises the amino acid sequence of any one of SEQ ID NOS:4, 12, 20, and 84. In some embodiments, the antibody heavy chain comprises the amino acid sequence of any one of SEQ ID NOS:32, 40, 48, and 92. In some embodiments, the antibody heavy chain comprises the amino acid sequence of any one of SEQ ID NOS:261, 269, 277, and 285.

[0089] In other aspects, provided herein is a pharmaceutical composition comprising an Fc polypeptide dimer-antibody variable region fusion protein described herein and a pharmaceutically acceptable carrier.

[0090] In other aspects, provided herein is a method of transcytosis of an antibody variable region that is capable of binding human HER2, or an antigen-binding fragment thereof, across an endothelium, the method comprising contacting the endothelium with a composition comprising an Fc polypeptide dimer-antibody variable region fusion protein described herein. In some embodiments, the endothelium is the BBB.

[0091] In other aspects, provided herein is a method for treating a cancer in a subject, the method comprising administering to the subject a therapeutically effective amount of a composition comprising an Fc polypeptide dimer-antibody variable region fusion protein described herein. In some embodiments, the cancer is a HER2-positive cancer. In some embodiments, the HER2-positive cancer is a HER2-positive breast cancer. In some embodiments, the HER2-positive cancer is a HER2-positive gastric adenocarcinoma and/or a HER2-positive gastroesophageal junction adnocarcinoma. the HER2-positive cancer is a metastatic cancer.

[0092] In other aspects, provided herein is a method for treating brain metastasis of a HER2-positive cancer in a subject, the method comprising administering to the subject a therapeutically effective amount of a composition comprising an Fc polypeptide dimer-antibody variable region fusion protein described herein. In some embodiments, the HER2-positive cancer is a HER2-positive breast cancer. In some embodiments, the HER2-positive cancer is a HER2-positive gastric adenocarcinoma and/or a HER2-positive gastroesophageal junction adnocarcinoma.

[0093] In some embodiments, a combination of different Fc polypeptide dimer-antibody variable region fusion proteins (e.g., a combination of Fc polypeptide dimer-antibody variable region fusion proteins that bind to subdomains IV and II of HER2) is administered. In some embodiments, a first Fc polypeptide dimer-antibody variable region fusion protein and a second Fc polypeptide dimer-antibody variable region fusion protein are administered to the subject, wherein the antibody variable region of the first Fc polypeptide dimer-antibody variable region fusion protein comprises two antibody heavy chain variable regions comprising the amino acid sequence of SEQ ID NO:59 and two light chain variable regions comprising the amino acid sequence of SEQ ID NO:60 (i.e., an anti-HER2 subdomain IV Fc polypeptide dimer-antibody variable region fusion protein), and wherein the antibody variable region of the second Fc polypeptide dimer-antibody variable region fusion protein comprises two antibody heavy chain variable regions comprising the amino acid sequence of SEQ ID NO:61 and two light chain variable regions comprising the amino acid sequence of SEQ ID NO:62 (i.e., an anti-HER2 subdomain II Fc polypeptide dimer-antibody variable region fusion protein). In some embodiments, an anti-HER2 subdomain IV Fc polypeptide dimer-antibody variable region fusion protein can be administered alone or in combination with an anti-HER2 subdomain II Fc polypeptide dimer-antibody variable region fusion protein. In some embodiments, an anti-HER2 subdomain II Fc polypeptide dimer-antibody variable region fusion protein can be administered alone or in combination with an anti-HER subdomain IV Fc polypeptide dimer-antibody variable region fusion protein. In certain embodiments, an anti-HER2 subdomain IV Fc polypeptide dimer-antibody variable region fusion protein can be administered alone. In certain embodiments, an anti-HER2 subdomain II Fc polypeptide dimer-antibody variable region fusion protein can be administered alone.

[0094] In some embodiments, a combination of different Fc polypeptide dimer-antibody variable region fusion proteins (e.g., a combination of Fc polypeptide dimer-antibody variable region fusion proteins that bind to subdomains II and I of HER2) is administered. In some embodiments, a first Fc polypeptide dimer-antibody variable region fusion protein and a second Fc polypeptide dimer-antibody variable region fusion protein are administered to the subject, wherein the antibody variable region of the first Fc polypeptide dimer-antibody variable region fusion protein comprises two antibody heavy chain variable regions comprising the amino acid sequence of SEQ ID NO:61 and two light chain variable regions comprising the amino acid sequence of SEQ ID NO:62 (i.e., an anti-HER2 subdomain II Fc polypeptide dimer-antibody variable region fusion protein), and wherein the antibody variable region of the second Fc polypeptide dimer-antibody variable region fusion protein comprises two antibody heavy chain variable regions comprising the amino acid sequence of SEQ ID NO:256 and two light chain variable regions comprising the amino acid sequence of SEQ ID NO:257 (i.e., an anti-HER2 subdomain I Fc polypeptide dimer-antibody variable region fusion protein). In some embodiments, an anti-HER2 subdomain II Fc polypeptide dimer-antibody variable region fusion protein can be administered alone or in combination with an anti-HER2 subdomain I Fc polypeptide dimer-antibody variable region fusion protein. In some embodiments, an anti-HER2 subdomain I Fc polypeptide dimer-antibody variable region fusion protein can be administered alone or in combination with an anti-HER subdomain II Fc polypeptide dimer-antibody variable region fusion protein. In certain embodiments, an anti-HER2 subdomain II Fc polypeptide dimer-antibody variable region fusion protein can be administered alone. In certain embodiments, an anti-HER2 subdomain I Fc polypeptide dimer-antibody variable region fusion protein can be administered alone.

[0095] In some embodiments, a combination of different Fc polypeptide dimer-antibody variable region fusion proteins (e.g., a combination of Fc polypeptide dimer-antibody variable region fusion proteins that bind to subdomains IV and I of HER2) is administered. In some embodiments, a first Fc polypeptide dimer-antibody variable region fusion protein and a second Fc polypeptide dimer-antibody variable region fusion protein are administered to the subject, wherein the antibody variable region of the first Fc polypeptide dimer-antibody variable region fusion protein comprises two antibody heavy chain variable regions comprising the amino acid sequence of SEQ ID NO:59 and two light chain variable regions comprising the amino acid sequence of SEQ ID NO:60 (i.e., an anti-HER2 subdomain IV Fc polypeptide dimer-antibody variable region fusion protein), and wherein the antibody variable region of the second Fc polypeptide dimer-antibody variable region fusion protein comprises two antibody heavy chain variable regions comprising the amino acid sequence of SEQ ID NO:256 and two light chain variable regions comprising the amino acid sequence of SEQ ID NO:257 (i.e., an anti-HER2 subdomain I Fc polypeptide dimer-antibody variable region fusion protein). In some embodiments, an anti-HER2 subdomain IV Fc polypeptide dimer-antibody variable region fusion protein can be administered alone or in combination with an anti-HER2 subdomain I Fc polypeptide dimer-antibody variable region fusion protein. In some embodiments, an anti-HER2 subdomain I Fc polypeptide dimer-antibody variable region fusion protein can be administered alone or in combination with an anti-HER subdomain IV Fc polypeptide dimer-antibody variable region fusion protein. In certain embodiments, an anti-HER2 subdomain IV Fc polypeptide dimer-antibody variable region fusion protein can be administered alone. In certain embodiments, an anti-HER2 subdomain I Fc polypeptide dimer-antibody variable region fusion protein can be administered alone.

[0096] In some embodiments, the composition comprising the Fc polypeptide dimer-antibody variable region fusion protein antagonizes HER2 activity. In some embodiments, the subject has not been previously treated with an anti-HER2 therapy and/or a chemotherapy for metastatic disease.

[0097] In yet another aspect, the disclosure features a method for treating a cancer or treating brain metastasis of a cancer in a subject, the method comprising administering to the subject a therapeutically effective amount of an anti-HER2 construct that binds to (a) subdomain I or II of human HER2 and (b) a transferrin receptor (TfR), wherein the anti-HER2 construct alone is therapeutically effective for treating the cancer.

[0098] In some embodiments of this aspect, the anti-HER2 construct comprises an antibody variable region that binds to subdomain I or II of human HER2. The anti-HER2 construct can comprise a modified Fc polypeptide dimer that comprises a first Fc polypeptide that contains modifications that create a TfR-binding site. For example, the anti-HER2 construct is an Fc polypeptide dimer-antibody variable region fusion protein.

[0099] In other embodiments of this aspect, the anti-HER2 construct comprises an antibody variable region that binds TfR. For example, the anti-HER2 construct can be a bispecific construct comprising an antibody variable region that binds to subdomain I or II of human HER2 and an antibody variable region that binds TfR.

[0100] In some embodiments, the anti-HER2 construct is administered to the subject as a monotherapy. In some embodiments, the anti-HER2 construct is adminstered in combination with a chemotherapy or radiation therapy.

[0101] In some embodiments, the anti-HER2 construct specifically binds to HER2 and TfR on the same cell.

[0102] In another aspect, the disclosure features a method for treating a cancer or treating brain metastasis of a cancer in a subject, the method comprising administering to the subject a therapeutically effective amount of:

(a) a first anti-HER2 construct that binds to subdomain II of human HER2; and
(b) a second anti-HER2 construct that binds to subdomain IV of human HER2,
or
(a) a first anti-HER2 construct that binds to subdomain I of human HER2; and
(b) a second anti-HER2 construct that binds to subdomain IV of human HER2,
or
(a) a first anti-HER2 construct that binds to subdomain I of human HER2; and
(b) a second anti-HER2 construct that binds to subdomain II of human HER2,
wherein the first and/or the second anti-HER2 construct also binds TfR.

[0103] In some embodiments of this aspect, the first anti-HER2 construct, but not the second anti-HER2 construct, binds TfR. The first anti-HER2 construct can specifically bind to TfR and HER2 on the same cell.

[0104] In some embodiments, the second anti-HER2 construct, but not the first anti-HER2 construct, binds TfR. The second anti-HER2 construct can specifically bind to TfR and HER2 on the same cell.

[0105] In some embodiments of this aspect, the first and/or the second anti-HER2 construct comprises an antibody variable region that binds to subdomain I, II, or IV of human HER2 and a modified Fc polypeptide dimer that comprises a first Fc polypeptide that contains modifications that create a TfR-binding site. In certain embodiments, the first anti-HER2 construct is an Fc polypeptide dimer-antibody variable region fusion protein. In certain embodiments, the second anti-HER2 construct is an Fc polypeptide dimer-antibody variable region fusion protein. In certain embodiments, the first and second anti-HER2 constructs are Fc polypeptide dimer-antibody variable region fusion proteins.

[0106] In some embodiments, the Fc polypeptide dimer-antibody variable region fusion protein comprises two heavy chain variable regions and two light chain variable regions that bind to subdomain II of HER2, wherein each of the two heavy chain variable regions comprises a heavy chain CDR1 (CDR-H1), a CDR H2, and a CDR H3, and each of the two light chain variable regions comprises a light chain CDR1 (CDR-L1), a CDR L2, and a CDR L3, and wherein:

(1) the CDR-H1 comprises a sequence having at least 90% sequence identity to or having up to two amino acid substitutions relative to the amino acid sequence of SEQ ID NO:75;
(2) the CDR-H2 comprises a sequence having at least 90% sequence identity to or having up to two amino acid substitutions relative to the amino acid sequence of SEQ ID NO:76;
(3) the CDR-H3 comprises a sequence having at least 90% sequence identity to or having up to two amino acid substitutions relative to the amino acid sequence of SEQ ID NO:77;
(4) the CDR-L1 comprises a sequence having at least 90% sequence identity to or having up to two amino acid substitutions relative to the amino acid sequence of SEQ ID NO:78;
(5) the CDR-L2 comprises a sequence having up to two amino acid substitutions relative to the amino acid sequence of SEQ ID NO:79; and
(6) the CDR-L3 comprises a sequence having up to two amino acid substitutions relative to the amino acid sequence of SEQ ID NO:80.

[0107] In some embodiments of the Fc polypeptide dimer-antibody variable region fusion protein that binds to subdomain II of HER2, each of the two heavy chain variable regions comprises a sequence having at least 90% sequence identity to the amino acid sequence of SEQ ID NO:61 and each of the two light chain variable regions comprises a sequence having at least 90% sequence identity to the amino acid sequence of SEQ ID NO:62.

[0108] In some embodiments, the Fc polypeptide dimer-antibody variable region fusion protein comprises two heavy chain variable regions and two light chain variable regions that bind to subdomain I of HER2, wherein each of the two heavy chain variable regions comprises a heavy chain CDR1 (CDR-H1), a CDR H2, and a CDR H3, and each of the two light chain variable regions comprises a light chain CDR1 (CDR-L1), a CDR L2, and a CDR L3, and wherein:

(1) the CDR-H1 comprises a sequence having at least 90% sequence identity to or having up to two amino acid substitutions relative to the amino acid sequence of SEQ ID NO:250;
(2) the CDR-H2 comprises a sequence having at least 90% sequence identity to or having up to two amino acid substitutions relative to the amino acid sequence of SEQ ID NO:251;
(3) the CDR-H3 comprises a sequence having at least 90% sequence identity to or having up to two amino acid substitutions relative to the amino acid sequence of SEQ ID NO:252;
(4) the CDR-L1 comprises a sequence having at least 90% sequence identity to or having up to two amino acid substitutions relative to the amino acid sequence of SEQ ID NO:253;
(5) the CDR-L2 comprises a sequence having up to two amino acid substitutions relative to the amino acid sequence of SEQ ID NO:254; and
(6) the CDR-L3 comprises a sequence having up to two amino acid substitutions relative to the amino acid sequence of SEQ ID NO:255.

[0109] In some embodiments of the Fc polypeptide dimer-antibody variable region fusion protein that binds to subdomain I of HER2, each of the two heavy chain variable regions comprises a sequence having at least 90% sequence identity to the amino acid sequence of SEQ ID NO:256 and each of the two light chain variable regions comprises a sequence having at least 90% sequence identity to the amino acid sequence of SEQ ID NO:257.

[0110] In some embodiments, the Fc polypeptide dimer-antibody variable region fusion protein comprises two heavy chain variable regions and two light chain variable regions that bind to subdomain IV of HER2, wherein each of the two heavy chain variable regions comprises a heavy chain CDR1 (CDR-H1), a CDR H2, and a CDR H3, and each of the two light chain variable regions comprises a light chain CDR1 (CDR-L1), a CDR L2, and a CDR L3, and wherein:

(1) the CDR-H1 comprises a sequence having at least 90% sequence identity to or having up to two amino acid substitutions relative to the amino acid sequence of SEQ ID NO:69;
(2) the CDR-H2 comprises a sequence having at least 90% sequence identity to or having up to two amino acid substitutions relative to the amino acid sequence of SEQ ID NO:70;
(3) the CDR-H3 comprises a sequence having at least 90% sequence identity to or having up to two amino acid substitutions relative to the amino acid sequence of SEQ ID NO:71;
(4) the CDR-L1 comprises a sequence having at least 90% sequence identity to or having up to two amino acid substitutions relative to the amino acid sequence of SEQ ID NO:72;
(5) the CDR-L2 comprises a sequence having up to two amino acid substitutions relative to the amino acid sequence of SEQ ID NO:73; and
(6) the CDR-L3 comprises a sequence having up to two amino acid substitutions relative to the amino acid sequence of SEQ ID NO:74.

[0111] In some embodiments of the Fc polypeptide dimer-antibody variable region fusion protein that binds to subdomain IV of HER2, each of the two heavy chain variable regions comprises a sequence having at least 90% sequence identity to the amino acid sequence of SEQ ID NO:59 and each of the two light chain variable regions comprises a sequence having at least 90% sequence identity to the amino acid sequence of SEQ ID NO:60.

[0112] In some embodiments of this aspect, the TfR-binding site in the Fc polypeptide of the Fc polypeptide dimer-antibody variable region fusion protein comprises a modified CH3 domain. The modified CH3 domain can be derived from a human IgG1, IgG2, IgG3, or IgG4 CH3 domain. The modified CH3 domain can comprise one, two, three, four, five, six, seven, eight, nine, ten, or eleven substitutions in a set of amino acid positions comprising 380, 384, 386, 387, 388, 389, 390, 413, 415, 416, and 421, according to EU numbering.

[0113] In some embodiments, the modified CH3 domain comprises Glu, Leu, Ser, Val, Trp, Tyr, or Gln at position 380; Leu, Tyr, Phe, Trp, Met, Pro, or Val at position 384; Leu, Thr, His, Pro, Asn, Val, or Phe at position 386; Val, Pro, Ile, or an acidic amino acid at position 387; Trp at position 388; an aliphatic amino acid, Gly, Ser, Thr, or Asn at position 389; Gly, His, Gln, Leu, Lys, Val, Phe, Ser, Ala, Asp, Glu, Asn, Arg, or Thr at position 390; an acidic amino acid, Ala, Ser, Leu, Thr, Pro, Ile, or His at position 413; Glu, Ser, Asp, Gly, Thr, Pro, Gln, or Arg at position 415; Thr, Arg, Asn, or an acidic amino acid at position 416; and/or an aromatic amino acid, His, or Lys at position 421, according to EU numbering.

[0114] In some embodiments of this aspect of the disclosure, the anti-HER2 construct binds to the apical domain of TfR. In some embodiments, the modified Fc polypeptide dimer comprises a first Fc polypeptide comprising amino acid modifications that reduce FcγR binding when bound to TfR. In certain embodiments, the amino acid modifications comprise Ala at position 234 and at position 235, according to EU numbering. In some embodiments, one or both Fc polypeptides that are present in the Fc polypeptide dimer comprise amino acid modifications that increase serum half-life. In certain embodiments, the amino acid modifications that increase serum half-life comprise (i) a Leu at position 428 and a Ser at position 434, or (ii) a Ser or Ala at position 434, according to EU numbering.

[0115] In some embodiments of this aspect of the disclosure, the first Fc polypeptide further comprises a knob mutation T366W and a second Fc polypeptide in the Fc polypeptide dimer comprises hole mutations T366S, L368A, and Y407V, according to EU numbering. For example, in some embodiments, the first Fc polypeptide comprises the amino acid sequence of SEQ ID NO:63. In some embodiments, the second Fc polypeptide comprises the amino acid sequence of any one of SEQ ID NOS:67 and 68.

[0116] In some embodiments, the Fc polypeptide dimer-antibody variable region fusion protein that binds to subdomain II of human HER2 comprises:

(a) a first heavy chain having the sequence of SEQ ID NO:38, a second heavy chain having the sequence of SEQ ID NO:55;
or
(b) a first heavy chain having the sequence of SEQ ID NO:46, a second heavy chain having the sequence of SEQ ID NO:55;
or
(c) a first heavy chain having the sequence of SEQ ID NO:30, a second heavy chain having the sequence of SEQ ID NO:55.

[0117] In some embodiments, the Fc polypeptide dimer-antibody variable region fusion protein that binds to subdomain I of human HER2 comprises:

(a) a first heavy chain having the sequence of SEQ ID NO:267, a second heavy chain having the sequence of SEQ ID NO:290;
or
(b) a first heavy chain having the sequence of SEQ ID NO:275, a second heavy chain having the sequence of SEQ ID NO:290;
or
(c) a first heavy chain having the sequence of SEQ ID NO:259, a second heavy chain having the sequence of SEQ ID NO:290.

[0118] In some embodiments, the Fc polypeptide dimer-antibody variable region fusion protein that binds to subdomain IV of human HER2 comprises:

(a) a first heavy chain having the sequence of SEQ ID NO:10, a second heavy chain having the sequence of SEQ ID NO:27;
or
(b) a first heavy chain having the sequence of SEQ ID NO:18, a second heavy chain having the sequence of SEQ ID NO:27;
or
(c) a first heavy chain having the sequence of SEQ ID NO:2, a second heavy chain having the sequence of SEQ ID NO:27.

[0119] In other embodiments of this aspect, the first and/or the second anti-HER2 construct comprises an antibody variable region that binds TfR. For example, the first anti-HER2 construct can be a bispecific construct comprising an antibody variable region that binds to human HER2 and an antibody variable region that binds TfR. The second anti-HER2 construct can be a bispecific construct comprising an antibody variable region that binds to human HER2 and an antibody variable region that binds TfR. Both the first and the second anti-HER2 constructs can be bispecific constructs comprising an antibody variable region that binds to human HER2 and an antibody variable region that binds TfR.

[0120] In some embodiments of this aspect of the disclosure, the cancer is a HER2-positive breast cancer. The HER2-positive cancer can be a HER2-positive gastric adenocarcinoma and/or a HER2-positive gastroesophageal junction adnocarcinoma.

[0121] In another aspect, the disclosure features a method of reducing TfR expression level on the surface of a cell by contacting the cell with an anti-HER2 construct that binds to (a) subdomain I, II, or IV of human HER2 and (b) a transferrin receptor (TfR), wherein the anti-HER2 construct alone is effective in reducing TfR expression level on the cell surface of the cell, and wherein the anti-HER2 construct binds to both TfR and HER2 on the same cell. In this aspect, the anti-HER2 construct can be any of the constructs described herein, such as an Fc polypeptide dimer-antibody variable region fusion protein (which includes an antibody variable region that is capable of binding to human HER2 and a modified Fc polypeptide dimer that comprises a first Fc polypeptide that contains modifications that create a TfR-binding site) or an anti-HER2 bispecific construct (which includes an antibody variable region that is capable of binding to human HER2 and an antibody variable region that binds TfR).

[0122] In yet another aspect, the disclosure features a method of binding a construct to TfR and human HER2 that are expressed on a cell (e.g., TfR and human HER2 expressed on the same cell), comprising contacting the cell with an anti-HER2 construct that binds to (a) subdomain I, II, or IV of human HER2 and (b) a transferrin receptor (TfR), wherein the anti-HER2 construct reduces TfR expression level on the cell surface of the cell when the cell is in contact with the anti-HER2 construct. In this aspect, the construct that binds to TfR and human HER2 can be any of the constructs described herein, such as an Fc polypeptide dimer-antibody variable region fusion protein (which includes an antibody variable region that is capable of binding to human HER2 and a modified Fc polypeptide dimer that comprises a first Fc polypeptide that contains modifications that create a TfR-binding site) or an anti-HER2 bispecific construct (which includes an antibody variable region that is capable of binding to human HER2 and an antibody variable region that binds TfR).

[0123] In some embodiments, the anti-HER2 construct reduces TfR expression level on the cell surface of the cell by at least 10% (e.g., at least 15%, 20%, 25%, 30%, 35%, 40%, 45%, or 50%) when the cell is in contact with the fusion protein.

[0124] In some embodiments, the anti-HER2 construct comprises an antibody variable region that binds to subdomain I, II, or IV of human HER2. In certain embodiments, the anti-HER2 construct can comprise an antibody variable region that binds to subdomain I, II, or IV of human HER2 and a modified Fc polypeptide dimer that comprises a first Fc polypeptide that contains modifications that create a TfR-binding site. For example, the anti-HER2 construct can be an Fc polypeptide dimer-antibody variable region fusion protein. In yet other embodiments, the anti-HER2 constructs can be a bispecific construct comprising an antibody variable region that binds to human HER2 and an antibody variable region that binds TfR.

[0125] In any of the aspects described herein, in some embodiments, the cell is a cancer cell (e.g., a metastatic cancer cell). In certain embodiments, the cancer cell expresses both HER2 and TfR. In some embodiments, the cell can be a breast cancer cell (e.g., a HER2 positive cancer cell). In some embodiments of any of the aspects described herein, the cell is a mammalian cell, such as a human cell (e.g., a human cancer cell).

[0126] In any of the aspects described herein, in some embodiments, the cell is in a mammal, such as a human. In some embodiments, the human has or has been diagnosed with a HER2-positive cancer. In certain embodiments, the HER2-positive cancer is a metastatic cancer. In particular embodiments, the HER2-positive, metastatic cancer has metastasized to the brain.

### BRIEF DESCRIPTION OF THE DRAWINGS

[0127] FIGS. 1A and 1B show Biacore™ data. FIG. 1A shows binding affinities to HER2 extracellular domain using anti-HER2_DIV, HER2_DIV-35.23.1.1^{cisLALA} anti-HER2_DII, and HER2_DII-35.23.1.1^{cisLALA}. FIG. 1B shows binding affinities to human apical hTfR using HER2_DIV-35.23.1.1^{cisLALA} and HTER2_DII-35.23.1.1^{cisLALA}

[0128] FIG. 2 shows a growth inhibition assay of BT474 cells using WST1 reagent showing the inhibition of cancer cell proliferation on Day 6 by anti-HER2_DIV, HER2_DIV-35.23.1.1^{cisLALA}, a combination of anti-HER2_DIV and anti-HER2 DII, and a combination of HER2_DIV-35.23.1.1^{cisLALA} and HER2_DII-35.23.1.1^{cisLALA}

[0129] FIG. 3 shows Western blot data demonstrating the decrease of phosphorylated AKT (p-AKT) in BT474 cells treated with anti-HER2_DIV and HER2_DIV-35.23.1.1^{cisLALA}

[0130] FIG. 4 shows a growth inhibition assay of BT474 cells using WST1 reagent showing the response of cancer cell proliferation on Day 6 by anti-HER2_DIV, HER2_DIV-35.23.1.1^{cisLALA}, a combination of anti-HER2_DIV and anti-HER2 DII, and a combination of HER2_DIV-35.23.1.1^{cisLALA} and HER2_DII-35.23.1.1^{cisLALA} in the presence of neuregulin-1.

[0131] FIG. 5 shows Western blot data of protein levels of phosphorylated AKT (p-AKT) in BT474 cells treated with anti-HER2_DIV and HER2_DIV-35.23.1.1^{cisLALA} a combination of anti-HER2_DIV and anti-HER2_DII, and a combination of HER2_DIV-35.23.1.1^{cisLALA} and HER2_DII-35.23.1.1^{cisLALA} in the presence of neuregulin-1.

[0132] FIG. 6 shows ADCC activity in SK-BR-3 cells using HER2_DIV-35.23.1.1^{cisLALA}

[0133] FIGS. 7A-7C show the in vivo anti-tumor efficacy of ATV:HER2-DIV and ATV:HER2-DII in BT474 xenograft tumor model in SCID mice. FIG. 7A shows a significantly higher tumor growth inhibition in the animals treated with ATV:HER2-DIV+ATV:HER2-DII compared to anti-HER2-DIV+anti-HER2-DII. FIG. 7B shows a dose-response relationship using doses 3, 10, and 20 mg/kg of each test article showing that ATV:HER2-DIV+ATV:HER2-DII is more potent than anti-HER2-DIV+anti-HER2-DII. FIG. 7C shows that treatment of both anti-HER2-DIV+anti-HER2-DII and ATV:HER2-DIV+ATV:HER2-DII significantly reduced pAKT levels, which is consistent with the mechanism in which targeting against HER2 could abrogate the PI3K/Akt signaling pathway that is activated in HER2⁺ tumors. “ATV” refers to a TfR-binding Fc polypeptide.

[0134] FIGS. 8A-8C show the plasma exposure, brain uptake, and brain to plasma ratio of TfR^{mu/hu} KI mice treated with ATV:HER2-DIV and ATV:HER2-DII.

[0135] FIGS. 9A and 9B show growth inhibition assays of BT474 cells and OE19 cells using ATV:HER2-DIV showing that ATV:HER2-DIV has increased anti-proliferative effect compared to anti-HER2_DIV in the anti-HER2_DIV-resistant HER2⁺ cancer cell lines.

[0136] FIGS. 10A and 10B show growth inhibition assays of BT474 cells and OE19 cells using ATV:HER2-DII showing that ATV:HER2-DII has superior growth inhibition than anti-HER2-DII while ATV:ctrl and anti-TfR with or without anti-HER2-DII groups have minimal effects in the HER2⁺ cancer cell lines.

[0137] FIG. 11 shows a growth inhibition assay of OE19 cells using ATV:HER2-DI showing that ATV:HER2-DI has superior growth inhibition than anti-HER2-DI in HER2⁺ cancer cell lines.

[0138] FIG. 12 shows growth inhibition assay of BT474 cells without NRG1 using ATV:HER2-DIV+ATV:HER2-DII showing that the combination of ATV:HER2-DIV+ATV:HER2-DII is more potent in growth inhibition than the combination of anti-HER2-DIV+anti-HER2-DII with or without NRG1.

[0139] FIGS. 13A-13C show the cell surface TfR expression in BT474 cells treated with ATV:HER2-DIV, ATV:HER2-DII, and the combination of ATV:HER2-DIV and ATV:HER2-DII. Treatment of ATV:HER2-DIV and ATV:HER2-DII enhanced down-regulation of cell surface TfR expression upon internalization conditions (37° C. for 30 min).

### DETAILED DESCRIPTION

### I. Introduction

[0140] We have developed anti-HER2 constructs that are capable of crossing the BBB. In general, these anti-HER2 constructs include an antibody variable region that is capable of binding to human HER2 (e.g., subdomain I, II, or IV of human HER2). In some embodiments, the anti-HER2 constructs include an antibody variable region that is capable of binding HER2 fused to a modified Fc polypeptide that has been engineered to include a non-native TfR-binding site, which is also referred to as “an Fc polypeptide dimer-antibody variable region fusion protein” herein. For example, an Fc polypeptide dimer-antibody variable region fusion protein can include an anti-HER2 Fab fused to a modified Fc polypeptide dimer that includes a TfR-binding site.

[0141] In other embodiments, the anti-HER2 constructs include an antibody variable region that is capable of binding HER2 (e.g., subdomain I, II, or IV of human HER2) and an antibody variable region that is capable of binding TfR.

[0142] Thus, the present disclosure relates, in part, to Fc polypeptide dimer-antibody variable region fusion proteins, and fragments thereof, that have been engineered to bind subdomain IV, subdomain II, or subdomain I of HER2, bind TfR, have reduced effector function (e.g., ADCC or CDC) when bound to TfR, but still retain and exhibit a level of effector function (e.g., ADCC or CDC) when the Fc polypeptide dimer-antibody variable region fusion protein is bound to HER2. The present disclosure also relates, in part, to methods for delivering anti-HER2 therapeutic constructs across the BBB and treating HER2-positive cancers, as well as metastases of HER2-positive cancers. Surprisingly, as described herein, it was found that using a combination of Fc polypeptide dimer-antibody variable region fusion proteins that target HER2 subdomains IV and II was more effective for inhibiting breast cancer cell growth than using a combination of anti-HER2 subdomain IV and anti-HER2 subdomain II antibodies. Moreover, in some embodiments, using a combination of Fc polypeptide dimer-antibody variable region fusion proteins that target HER2 subdomains IV and I is more effective for inhibiting breast cancer cell growth than using a combination of anti-HER2 subdomain IV and anti-HER2 subdomain I antibodies. Further, in some embodiments, using a combination of Fc polypeptide dimer-antibody variable region fusion proteins that target HER2 subdomains II and I is more effective for inhibiting breast cancer cell growth than using a combination of anti-HER2 subdomain II and anti-HER2 subdomain I antibodies.

[0143] Moreover, using an Fc polypeptide dimer-antibody variable region fusion protein that targets HER2 subdomain IV, subdomain II, or subdomain I alone is more effective for inhibiting breast cancer cell growth than using an anti-HER2 subdomain IV antibody, an anti-HER2 subdomain II antibody, or an anti-HER2 subdomain I antibody, respectively. Further, using an Fc polypeptide dimer-antibody variable region fusion protein that targets HER2 subdomain IV, subdomain II, or subdomain I alone is more effective for inhibiting breast cancer cell growth than using a combination of an anti-HER2 subdomain IV antibody and an anti-TfR antibody, a combination of an anti-HER2 subdomain II antibody and an anti-TfR antibody, or a combination of an anti-HER2 subdomain I antibody and an anti-TfR antibody, respectively.

[0144] In other embodiments, the present disclosure also relates, in part, to using an anti-HER2 construct that includes an antibody variable region that is capable of binding HER2 (e.g., subdomain I, II, or IV of human HER2) and an antibody variable region that is capable of binding TfR to inhibit breast cancer cell growth. Using such anti-HER2 constructs having bispecificity to HER2 (e.g., subdomain I, II, or IV of human HER2) and TfR is more effective for inhibiting breast cancer cell growth than using an anti-HER2 antibody (e.g., an anti-HER2 subdomain I antibody, an anti-HER2 subdomain II antibody, or an anti-HER2 subdomain IV antibody) alone.

### II. Definitions

[0145] As used herein, the singular forms “a,” “an,” and “the” include plural referents unless the content clearly dictates otherwise. Thus, for example, reference to “a polypeptide” may include two or more such molecules, and the like.

[0146] As used herein, the terms “about” and “approximately,” when used to modify an amount specified in a numeric value or range, indicate that the numeric value as well as reasonable deviations from the value known to the skilled person in the art, for example±20%, ±10%, or ±5%, are within the intended meaning of the recited value.

[0147] The terms “human epidermal growth factor receptor 2,” “HER2,” “HER2/neu,” and “ERBB2” (also known as CD340, receptor tyrosine-protein kinase erbB-2, proto-oncogene and Neu) refer to a tyrosine receptor kinase protein encoded by the ERBB2 gene in humans that is a member of the human epidermal growth factor receptor (HER/EGFR/ERBB) family. Amplification or overexpression of HER2 plays a significant role in the development and progression of certain aggressive types of cancer, including breast cancer. Non-limiting examples of human HER2 nucleotide sequences are set forth in GenBank reference numbers NP_001005862, NP_001289936, NP_001289937, NP_001289938, and NP_004448. Non-limiting examples of human HER2 peptide sequences are set forth in GenBank reference numbers NP_001005862, NP_001276865, NP_001276866, NP_001276867, and NP_004439.

[0148] The extracellular domain of HER2, which contains approximately 600 amino acids, includes four subdomains (subdomains I, II, III, and IV). Subdomains I and III form a ligand binding site. The cysteine-rich subdomains II and IV are involved in receptor homodimerization and heterodimerization. Anti-HER2 therapeutic constructs can bind to specific subdomains (e.g., subdomain II or subdomain IV).

[0149] When HER2 is amplified or overexpressed in a cell, the cell is referred to as being “HER2-positive” or “HER2+.” The level of HER2 amplification or overexpression in a HER2-positive cell is commonly expressed as a score ranging from 0 to 3 (i.e., HER2 0, HER2 1+, HER2 2+, or HER2 3+), with higher scores corresponding to greater degrees of expression.

[0150] HER2 testing methods include immunohistochemistry (IHC), fluorescence in situ hybridization (FISH), ELISA, and RNA quantification (e.g., of HER2 expression) methods such as RT-PCR and microarray analysis. HER2 testing can be performed on a subject (e.g., a patient) who is being considered for an anti-HER2 therapy.

[0151] As used herein, the term “anti-HER2 construct” refers to a molecule (e.g., a protein) construct that binds to (a) subdomain I, II, or IV of human HER2 and (b) a transferrin receptor (TfR). An anti-HER2 construct can include an antibody variable region that is capable of binding to human HER2. In some embodiments, an anti-HER2 construct is an Fc polypeptide dimer-antibody variable region fusion protein, which includes an antibody variable region that is capable of binding to human HER2 and a modified Fc polypeptide dimer that comprises a first Fc polypeptide that contains modifications that create a TfR-binding site. In other embodiments, an anti-HER2 construct is a bispecific construct, which includes an antibody variable region that is capable of binding to human HER2 and an antibody variable region that binds TfR. The anti-HER2 constructs as described herein can bind to subdomain I, II, or IV of human HER2.

[0152] As used herein, the term “anti-HER2-DI,” “anti-HER2-DII,” or “anti-HER2-DIV” refer to an antibody that binds to subdomain I, II, or IV, respectively, of human HER2.

[0153] As used herein, the term “Fc polypeptide” refers to the C-terminal region of a naturally occurring immunoglobulin heavy chain polypeptide that is characterized by an Ig fold as a structural domain. An Fc polypeptide contains constant region sequences including at least the CH2 domain and/or the CH3 domain and may contain at least part of the hinge region. In general, an Fc polypeptide does not contain a variable region.

[0154] A “modified Fc polypeptide” refers to an Fc polypeptide that has at least one mutation, e.g., a substitution, deletion or insertion, as compared to a wild-type immunoglobulin heavy chain Fc polypeptide sequence, but retains the overall Ig fold or structure of the native Fc polypeptide.

[0155] As used herein, the term “Fc polypeptide dimer” refers to a dimer of two Fc polypeptides. In some embodiments, an Fc polypeptide dimer is capable of binding an Fc receptor (e.g., FcγR). In an Fc polypeptide dimer, the two Fc polypeptides dimerize by the interaction between the two CH3 antibody constant domains. In some embodiments, the two Fc polypeptides may also dimerize via one or more disulfide bonds that form between the hinge domains of the two dimerizing Fc domain monomers. An Fc polypeptide dimer may be a wild-type Fc polypeptide dimer or a modified Fc polypeptide dimer. A wild-type Fc polypeptide dimer is formed by the dimerization of two wild-type Fc polypeptides. An Fc polypeptide dimer can be a heterodimer or a homodimer.

[0156] As used herein, the term “modified Fc polypeptide dimer” refers to an Fc polypeptide dimer that contains at least one modified Fc polypeptide. In some embodiments, a modified Fc polypeptide dimer contains two modified Fc polypeptides. A modified Fc polypeptide dimer may be a homodimer (i.e., contains two identical modified Fc polypeptides) or a heterodimer (i.e., contains two different Fc polypeptides in which at least one of the two Fc polypeptides is a modified Fc polypeptide).

[0157] A “transferrin receptor” or “TfR” as used herein refers to transferrin receptor protein 1. The human transferrin receptor 1 polypeptide sequence is set forth in SEQ ID NO:102. Transferrin receptor protein 1 sequences from other species are also known (e.g., chimpanzee, accession number XP_003310238.1; rhesus monkey, NP_001244232.1; dog, NP_001003111.1; cattle, NP_001193506.1; mouse, NP_035768.1; rat, NP_073203.1; and chicken, NP_990587.1). The term “transferrin receptor” also encompasses allelic variants of exemplary reference sequences, e.g., human sequences, that are encoded by a gene at a transferrin receptor protein 1 chromosomal locus. Full-length TfR protein includes a short N-terminal intracellular region, a transmembrane region, and a large extracellular domain. The extracellular domain is characterized by three domains: a protease-like domain, a helical domain, and an apical domain. The apical domain sequence of human transferrin receptor 1 is set forth in SEQ ID NO:103.

[0158] As used herein, the term “Fcγ receptor” or “FcγR” refers to one type of Fc receptors, which are classified based on the type of antibody that they recognize. FcγRs include several members, FcγRI (CD64), FcγRIIA (CD32), FcγRIIB (CD32), FcγRIIIA (CD16a), and FcγRIIIB (CD16b), which differ in their antibody affinities due to different molecular structures. FcγRs bind to the Fc portion of the IgG class of antibodies and are crucial for inducing phagocytosis of opsonized microbes. FcγRs are found on the cell surface of cells in the immune system. FcγRs are responsible for eliciting immune system effector functions and are activated upon binding of the Fc portion of an antibody to the receptor. FcγRs mediate immune functions, e.g., binding to antibodies that are attached to infected cells or invading pathogens, stimulating phagocytic or cytotoxic cells to destroy microbes or infected cells by antibody-mediated phagocytosis or ADCC.

[0159] As used herein, the term “reduce FcγR binding” refers to a modified Fc polypeptide or a modified Fc polypeptide dimer that contains mutations in the CH3 domain of the modified Fc polypeptide, in which the mutations decrease the affinity of the modified Fc polypeptide to the FcγR by 0.01% to 90% (e.g., 0.1%, 0.5%, 1%, 5%, 10%, 15%, 20%, 25%, 30%, 35%, 40%, 45%, 50%, 55%, 60%, 65%, 70%, 75%, 80%, 85%, or 90%) compared the affinity of an Fc polypeptide that does not contain mutations to reduce FcγR binding (e.g., a wild-type Fc polypeptide dimer). FcγR binding may be measured using, e.g., Surface Plasmon Resonance (SPR) methods (e.g., a Biacore™ system). Alternatively, FcγR binding can be measured using a functional assay, for example, an ADCC assay such as one described herein (e.g., an in vivo or in vitro assay of cell killing). The reduction of FcγR binding may be measured when the modified Fc polypeptide dimer is bound to TfR. In some embodiments, the modified Fc polypeptide or Fc polypeptide dimer may have reduced FcγR binding when bound to TfR, but limited (e.g., less than 25%, 20%, 15%, 10%, 8%, 5%, 3%, 2%, or 1% reduction) or no reduction when not bound to TfR).

[0160] As described further herein, a modified Fc polypeptide dimer may contain a first Fc polypeptide that has both a TfR-binding site and mutations that reduce FcγR binding when bound to TfR and a second Fc polypeptide that has neither a TfR-binding site nor mutations that reduce FcγR binding. Thus, upon TfR engagement, the resulting asymmetrical Fc polypeptide dimer having the first and second Fc polypeptides may have an overall reduced affinity for FcγR. By contrast, there may be limited (e.g., as described above) or no reduction in FcγR binding when not bound to TfR.

[0161] The term “FcRn” refers to the neonatal Fc receptor. Binding of Fc polypeptides to FcRn reduces clearance and increases serum half-life of the Fc polypeptide. The human FcRn protein is a heterodimer that is composed of a protein of about 50 kDa in size that is similar to a major histocompatibility (MHC) class I protein and a 02-microglobulin of about 15 kDa in size.

[0162] As used herein, an “FcRn binding site” refers to the region of an Fc polypeptide that binds to FcRn. In human IgG, the FcRn binding site, as numbered using the EU numbering scheme, includes L251, M252, 1253, S254, R255, T256, M428, H433, N434, H435, and Y436. These positions correspond to positions 21 to 26, 198, and 203 to 206 of SEQ ID NO:99.

[0163] As used herein, a “native FcRn binding site” refers to a region of an Fc polypeptide that binds to FcRn and that has the same amino acid sequence as the region of a naturally occurring Fc polypeptide that binds to FcRn.

[0164] As used herein, the term “does not substantially deplete reticulocytes” or “does not substantially deplete reticulocytes in vivo” means that the reduction in reticulotyes (e.g., the reduction in bone marrow recticulocytes or circulating reticulotyes) caused by an effector function-positive, TfR-binding Fc polypeptide dimer described herein, or an Fc polypeptide dimer-antibody variable region fusion protein described herein that contains an effector function-positive, TfR-binding Fc polypeptide dimer, is less than (e.g., less than 80%, 75%, 70%, 65%, 60%, 55%, 50%, 45%, 40%, 35%, 30%, 25%, 20%, 15%, 10%, 8%, 5%, 3%, 2%, or 1% of) the reduction in reticulocytes (e.g., the reduction in bone marrow recticulocytes or circulating reticulotyes) caused by a control, e.g., a corresponding TfR-binding Fc dimer or Fc polypeptide dimer-antibody variable region fusion protein with full effector function and/or contains no mutations that reduce FcγR binding, or an antibody containing a corresponding TfR-binding Fc dimer with full effector function and/or contains no mutations that reduce FcγR binding.

[0165] The term “does not substantially deplete reticulocytes” or “does not substantially deplete reticulocytes in vivo” can also mean that the amount or percentage of the remaining reticulotyes (e.g., the remaining reticulotyes in the bone marrow or in circulation) after dosing an effector function-positive, TfR-binding Fc polypeptide dimer described herein, or an Fc polypeptide dimer-antibody variable region fusion protein described herein that contains an effector function-positive, TfR-binding Fc polypeptide dimer, is more than (e.g., at least 1%, 5%, 10%, 15%, 20%, 25%, 30%, 35%, 40%, 45%, or 50% more than) the amount or percentage of the remaining reticulocytes (e.g., the remaining reticulotyes in the bone marrow or in circulation) after dosing a control (e.g., a corresponding TfR-binding Fc dimer or Fc polypeptide dimer-antibody variable region fusion protein with full effector function and/or contains no mutations that reduce FcγR binding, or an antibody containing a corresponding TfR-binding Fc dimer with full effector function and/or contains no mutations that reduce FcγR binding).

[0166] The amount or percentage of reticulocyte depletion (e.g., reticulocyte depletion in the bone marrow or in circulation), or the amount or percentage of remaining reticulocytes (e.g., remaining reticulocytes in the bone marrow or in circulation), may be measured in human TfR knock-in (TfR^{ms/hu} KI) mice (e.g., human TfR apical domain knock-in mice (“hTfR^{apical} knock-in mice”)), which are engineered to replace the mouse TfR with human apical domain/mouse chimeric TfR protein or in a non-human primate, such as a cynomolgus monkey. The measurement may be made by dosing the modified Fc dimer or control, e.g., 25 to 50 mg/kg intravenously (e.g., to the TfR^{ms/hu} KI mice) and circulating reticulocytes may be measured at 24 h post-dose by cytochemical reactions using the Advia 120 Hematology System, as described herein. Bone marrow reticulocytes can be measured using FACS sorting to determine the population of Ter 19⁺, hCD71^{hi}, and FSC^{low} population, as described herein.

[0167] The terms “CH3 domain” and “CH2 domain” as used herein refer to immunoglobulin constant region domain polypeptides. In the context of IgG antibodies, a CH3 domain polypeptide refers to the segment of amino acids from about position 341 to about position 447 as numbered according to the EU numbering scheme, and a CH2 domain polypeptide refers to the segment of amino acids from about position 231 to about position 340 as numbered according to the EU numbering scheme. CH2 and CH3 domain polypeptides may also be numbered by the IMGT (ImMunoGeneTics) numbering scheme in which the CH2 domain numbering is 1-110 and the CH3 domain numbering is 1-107, according to the IMGT Scientific chart numbering (IMGT website). CH2 and CH3 domains are part of the Fc region of an immunoglobulin. In the context of IgG antibodies, an Fc region refers to the segment of amino acids from about position 231 to about position 447 as numbered according to the EU numbering scheme. As used herein, the term “Fc region” may also include at least a part of a hinge region of an antibody. An illustrative hinge region sequence is set forth in SEQ ID NO:104.

[0168] The term “variable region” refers to a domain in an antibody heavy chain or light chain that derived from a germline Variable (V) gene, Diversity (D) gene, or Joining (J) gene (and not derived from a Constant (C and CS) gene segment), and that gives an antibody its specificity for binding to an antigen. Typically, an antibody variable region comprises four conserved “framework” regions interspersed with three hypervariable “complementarity determining regions.”

[0169] The terms “wild-type,” “native,” and “naturally occurring” with respect to a CH3 or CH2 domain are used herein to refer to a domain that has a sequence that occurs in nature.

[0170] As used herein, the term “mutant” with respect to a mutant polypeptide or mutant polynucleotide is used interchangeably with “variant.” A variant with respect to a given wild-type CH3 or CH2 domain reference sequence can include naturally occurring allelic variants. A “non-naturally” occurring CH3 or CH2 domain refers to a variant or mutant domain that is not present in a cell in nature and that is produced by genetic modification, e.g., using genetic engineering technology or mutagenesis techniques, of a native CH3 domain or CH2 domain polynucleotide or polypeptide. A “variant” includes any domain comprising at least one amino acid mutation with respect to wild-type. Mutations may include substitutions, insertions, and deletions.

[0171] The term “amino acid” refers to naturally occurring and synthetic amino acids, as well as amino acid analogs and amino acid mimetics that function in a manner similar to the naturally occurring amino acids.

[0172] Naturally occurring amino acids are those encoded by the genetic code, as well as those amino acids that are later modified, e.g., hydroxyproline, γ-carboxyglutamate and O-phosphoserine. “Amino acid analogs” refers to compounds that have the same basic chemical structure as a naturally occurring amino acid, i.e., an a carbon that is bound to a hydrogen, a carboxyl group, an amino group, and an R group, e.g., homoserine, norleucine, methionine sulfoxide, methionine methyl sulfonium. Such analogs have modified R groups (e.g., norleucine) or modified peptide backbones, but retain the same basic chemical structure as a naturally occurring amino acid. “Amino acid mimetics” refers to chemical compounds that have a structure that is different from the general chemical structure of an amino acid, but that function in a manner similar to a naturally occurring amino acid.

[0173] Naturally occurring α-amino acids include, without limitation, alanine (Ala), cysteine (Cys), aspartic acid (Asp), glutamic acid (Glu), phenylalanine (Phe), glycine (Gly), histidine (His), isoleucine (Ile), arginine (Arg), lysine (Lys), leucine (Leu), methionine (Met), asparagine (Asn), proline (Pro), glutamine (Gln), serine (Ser), threonine (Thr), valine (Val), tryptophan (Trp), tyrosine (Tyr), and combinations thereof. Stereoisomers of a naturally occurring α-amino acids include, without limitation, D-alanine (D-Ala), D-cysteine (D-Cys), D-aspartic acid (D-Asp), D-glutamic acid (D-Glu), D-phenylalanine (D-Phe), D-histidine (D-His), D-isoleucine (D-Ile), D-arginine (D-Arg), D-lysine (D-Lys), D-leucine (D-Leu), D-methionine (D-Met), D-asparagine (D-Asn), D-proline (D-Pro), D-glutamine (D-Gln), D-serine (D-Ser), D-threonine (D-Thr), D-valine (D-Val), D-tryptophan (D-Trp), D-tyrosine (D-Tyr), and combinations thereof.

[0174] Amino acids may be referred to herein by either their commonly known three letter symbols or by the one-letter symbols recommended by the IUPAC-IUB Biochemical Nomenclature Commission.

[0175] The terms “polypeptide” and “peptide” are used interchangeably herein to refer to a polymer of amino acid residues in a single chain. The terms apply to amino acid polymers in which one or more amino acid residue is an artificial chemical mimetic of a corresponding naturally occurring amino acid, as well as to naturally occurring amino acid polymers and non-naturally occurring amino acid polymers. Amino acid polymers may comprise entirely L-amino acids, entirely D-amino acids, or a mixture of L and D amino acids.

[0176] The term “protein” as used herein refers to either a polypeptide or a dimer (i.e, two) or multimer (i.e., three or more) of single chain polypeptides. The single chain polypeptides of a protein may be joined by a covalent bond, e.g., a disulfide bond, or non-covalent interactions.

[0177] The term “conservative substitution,” “conservative mutation,” or “conservatively modified variant” refers to an alteration that results in the substitution of an amino acid with another amino acid that can be categorized as having a similar feature. Examples of categories of conservative amino acid groups defined in this manner can include: a “charged/polar group” including Glu (Glutamic acid or E), Asp (Aspartic acid or D), Asn (Asparagine or N), Gln (Glutamine or Q), Lys (Lysine or K), Arg (Arginine or R), and His (Histidine or H); an “aromatic group” including Phe (Phenylalanine or F), Tyr (Tyrosine or Y), Trp (Tryptophan or W), and (Histidine or H); and an “aliphatic group” including Gly (Glycine or G), Ala (Alanine or A), Val (Valine or V), Leu (Leucine or L), Ile (Isoleucine or I), Met (Methionine or M), Ser (Serine or S), Thr (Threonine or T), and Cys (Cysteine or C). Within each group, subgroups can also be identified. For example, the group of charged or polar amino acids can be sub-divided into sub-groups including: a “positively-charged sub-group” comprising Lys, Arg and His; a “negatively-charged sub-group” comprising Glu and Asp; and a “polar sub-group” comprising Asn and Gln. In another example, the aromatic or cyclic group can be sub-divided into sub-groups including: a “nitrogen ring sub-group” comprising Pro, His and Trp; and a “phenyl sub-group” comprising Phe and Tyr. In another further example, the aliphatic group can be sub-divided into sub-groups, e.g., an “aliphatic non-polar sub-group” comprising Val, Leu, Gly, and Ala; and an “aliphatic slightly-polar sub-group” comprising Met, Ser, Thr, and Cys. Examples of categories of conservative mutations include amino acid substitutions of amino acids within the sub-groups above, such as, but not limited to: Lys for Arg or vice versa, such that a positive charge can be maintained; Glu for Asp or vice versa, such that a negative charge can be maintained; Ser for Thr or vice versa, such that a free —OH can be maintained; and Gln for Asn or vice versa, such that a free —NH₂ can be maintained. In some embodiments, hydrophobic amino acids are substituted for naturally occurring hydrophobic amino acid, e.g., in the active site, to preserve hydrophobicity.

[0178] The terms “identical” or percent “identity,” in the context of two or more polypeptide sequences, refer to two or more sequences or subsequences that are the same or have a specified percentage of amino acid residues, e.g., at least 60% identity, at least 65%, at least 70%, at least 75%, at least 80%, at least 85%, at least 90%, or at least 95% or greater, that are identical over a specified region when compared and aligned for maximum correspondence over a comparison window, or designated region as measured using one a sequence comparison algorithm or by manual alignment and visual inspection.

[0179] For sequence comparison of polypeptides, typically one amino acid sequence acts as a reference sequence, to which a candidate sequence is compared. Alignment can be performed using various methods available to one of skill in the art, e.g., visual alignment or using publicly available software using known algorithms to achieve maximal alignment. Such programs include the BLAST programs, ALIGN, ALIGN-2 (Genentech, South San Francisco, Calif.) or Megalign (DNASTAR). The parameters employed for an alignment to achieve maximal alignment can be determined by one of skill in the art. For sequence comparison of polypeptide sequences for purposes of this application, the BLASTP algorithm standard protein BLAST for aligning two proteins sequence with the default parameters is used.

[0180] The terms “corresponding to,” “determined with reference to,” or “numbered with reference to” when used in the context of the identification of a given amino acid residue in a polypeptide sequence, refers to the position of the residue of a specified reference sequence when the given amino acid sequence is maximally aligned and compared to the reference sequence. Thus, for example, an amino acid residue in a polypeptide “corresponds to” an amino acid in the region of SEQ ID NO:99, when the residue aligns with the amino acid in SEQ ID NO:99 when optimally aligned to SEQ ID NO:99. The polypeptide that is aligned to the reference sequence need not be the same length as the reference sequence.

[0181] As used herein, the term “specifically binds” or “selectively binds” to a target, e.g., TfR or FcγR, when referring to a polypeptide comprising a modified CH3 domain as described herein, refers to a binding reaction whereby the polypeptide binds to the target with greater affinity, greater avidity, and/or greater duration than it binds to a structurally different target. In typical embodiments, the polypeptide has at least 5-fold, 6-fold, 7-fold, 8-fold, 9-fold, 10-fold, 20-fold, 25-fold, 50-fold, 100-fold, 1,000-fold, 10,000-fold, or greater affinity for a specific target, e.g., TfR or FcγR, compared to an unrelated target when assayed under the same affinity assay conditions. The term “specific binding,” “specifically binds to,” or “is specific for” a particular target (e.g., e.g., TfR or FcγR), as used herein, can be exhibited, for example, by a molecule having an equilibrium dissociation constant K_{D} for the target to which it binds of, e.g., 10⁻⁴ M or smaller, e.g., 10⁻⁵ M, 10⁻⁶ M, 10⁻⁷ M, 10⁻⁸ M, 10⁻⁹ M, 10⁻¹⁰ M, 10⁻¹¹ M, or 10⁻¹² M. In some embodiments, a modified CH3 domain polypeptide specifically binds to an epitope on a TfR that is conserved among species (e.g., structurally conserved among species), e.g., conserved between non-human primate and human species (e.g., structurally conserved between non-human primate and human species). In some embodiments, a polypeptide may bind exclusively to a human TfR.

[0182] The term “binding affinity” as used herein refers to the strength of the non-covalent interaction between two molecules, e.g., a single binding site on a polypeptide and a target, e.g., TfR, to which it binds. Thus, for example, the term may refer to 1:1 interactions between a polypeptide and its target, unless otherwise indicated or clear from context. Binding affinity may be quantified by measuring an equilibrium dissociation constant (K_{D}), which refers to the dissociation rate constant (k_{d}, time⁻¹) divided by the association rate constant (k_{d}, time⁻¹ M⁻¹). K_{D} can be determined by measurement of the kinetics of complex formation and dissociation, e.g., using Surface Plasmon Resonance (SPR) methods, e.g., a Biacore™ system; kinetic exclusion assays such as KinExA®; and BioLayer interferometry (e.g., using the ForteBio® Octet® platform). As used herein, “binding affinity” includes not only formal binding affinities, such as those reflecting 1:1 interactions between a polypeptide and its target, but also apparent affinities for which K_{D}'s are calculated that may reflect avid binding.

[0183] The terms “antigen-binding portion” and “antigen-binding fragment” are used interchangeably herein and refer to one or more fragments of an antibody variable region that retains the ability to specifically bind to an antigen (e.g., HER2). Examples of antigen-binding fragments include, but are not limited to, a Fab fragment (a monovalent fragment consisting of the VL, VH, CL, and CH1 domains), a F(ab′)2 fragment (a bivalent fragment comprising two Fab fragments linked by a disulfide bridge at the hinge region), a single chain Fv (scFv), a disulfide-linked Fv (dsFv), complementarity determining regions (CDRs), a VL (light chain variable region), a VH (heavy chain variable region), nanobodies, diabodies, each of which bind the antigen via a variable region, and other formats as described in Spiess et al., Mol. Immun. 67 (2015) 95-106, which is incorporated herein by reference.

[0184] The term “complementarity determining region” or “CDR” refers to the three hypervariable regions in each chain that interrupt the four framework regions established by the light and heavy chain variable regions. The CDRs are primarily responsible for antibody binding to an epitope of an antigen. The CDRs of each chain are typically referred to as CDR1, CDR2, and CDR3, numbered sequentially starting from the N-terminus, and are also typically identified by the chain in which the particular CDR is located. Thus, a VH CDR3 or CDR-H3 is located in the variable region of the heavy chain of the antibody in which it is found, whereas a VL CDR1 or CDR-L1 is the CDR1 from the variable region of the light chain of the antibody in which it is found.

[0185] The “framework regions” or “FRs” of different light or heavy chains are relatively conserved within a species. The framework region of an antibody, that is the combined framework regions of the constituent light and heavy chains, serves to position and align the CDRs in three-dimensional space. Framework sequences can be obtained from public DNA databases or published references that include germline antibody gene sequences. For example, germline DNA sequences for human heavy and light chain variable region genes can be found in the “VBASE2” germline variable gene sequence database for human and mouse sequences.

[0186] The amino acid sequences of the CDRs and framework regions can be determined using various well known definitions in the art, e.g., Kabat, Chothia, international ImMunoGeneTics database (IMGT), AbM, and observed antigen contacts (“Contact”). In some embodiments, CDRs are determined according to the Contact definition. See, MacCallum et al., J. Mol. Biol., 262:732-745 (1996). In some embodiments, CDRs are determined by a combination of Kabat, Chothia, and Contact CDR definitions.

[0187] The term “subject,” “individual,” and “patient,” as used interchangeably herein, refer to a mammal, including but not limited to humans, non-human primates, rodents (e.g., rats, mice, and guinea pigs), rabbits, cows, pigs, horses, and other mammalian species. In one embodiment, the patient is a human.

[0188] The terms “treatment,” “treating,” and the like are used herein to generally mean obtaining a desired pharmacologic and/or physiologic effect. “Treating” or “treatment” may refer to any indicia of success in the treatment or amelioration of a cancer (e.g., a HER2-positive and/or metastatic cancer), including any objective or subjective parameter such as abatement, remission, improvement in patient survival, increase in survival time or rate, diminishing of symptoms or making the disease more tolerable to the patient, slowing in the rate of degeneration or decline, or improving a patient's physical or mental well-being. The treatment or amelioration of symptoms can be based on objective or subjective parameters. The effect of treatment can be compared to an individual or pool of individuals not receiving the treatment, or to the same patient prior to treatment or at a different time during treatment.

[0189] The term “pharmaceutically acceptable excipient” refers to a non-active pharmaceutical ingredient that is biologically or pharmacologically compatible for use in humans or animals, such as but not limited to a buffer, carrier, or preservative.

[0190] As used herein, a “therapeutic amount” or “therapeutically effective amount” of a construct (e.g., an antibody as described herein) is an amount of the construct that treats, alleviates, abates, or reduces the severity of symptoms of a disease in a subject. A “therapeutic amount” or “therapeutically effective amount” of a construct (e.g., an Fc polypeptide dimer-antibody variable region fusion protein or antibody heavy chain) may improve patient survival, increase survival time or rate, diminish symptoms, make an injury, disease, or condition (e.g., a cancer such as a HER2-positive and/or metastatic cancer) more tolerable, slow the rate of degeneration or decline, or improve a patient's physical or mental well-being.

[0191] The term “administer” refers to a method of delivering constructs, compounds, or compositions to the desired site of biological action. These methods include, but are not limited to, topical delivery, parenteral delivery, intravenous delivery, intradermal delivery, intramuscular delivery, intrathecal delivery, colonic delivery, rectal delivery, or intraperitoneal delivery. In one embodiment, an antibody as described herein is administered intravenously.

### III. Fc Polypeptide Dimer-Antibody Variable Region Fusion Proteins

[0192] In some aspects, the present disclosure provides Fc polypeptide dimer-antibody variable region fusion proteins that are capable of binding to human epidermal growth factor 2 (HER2) and are modified to bind to transferrin receptor (TfR), thus enabling the Fc polypeptide dimer-antibody variable region fusion proteins to cross the blood brain barrier (BBB)). In some embodiments The Fc polypeptide dimer-antibody variable region fusion proteins provided herein retain effector function upon binding to HER2, but have reduced effector function upon TfR binding. In this manner, the Fc polypeptide dimer-antibody variable region fusion proteins are able to transport an anti-HER2 antibody variable region (e.g., that form part of Fab domain) across the BBB without substantial depletion of reticulocytes (which also contain TfR on the cell surface), and still exhibit effector function that can target cancer cells (e.g., HER2-positive cancer cells or metastases thereof).

[0193] In some embodiments, provided herein are effector function-positive, Fc polypeptide dimer-antibody variable region fusion proteins that have a cis configuration, which means that only one (not both) of the Fc polypeptides in the Fc polypeptide dimer is modified to have a TfR-binding site and modifications that reduce FcγR binding when bound to TfR. In these embodiments, the other Fc polypeptide in the Fc polypeptide dimer does not contain either a TfR-binding site or modifications that substantially reduce FcγR binding. A trans configuration of the modified Fc polypeptide dimers refers to an Fc polypeptide dimer in which one of the two Fc polypeptides contains a TfR-binding site, while the other Fc polypeptide contains modifications, e.g., that reduce effector function, for example, when bound to TfR. Modified Fc polypeptide dimers having the cis configuration, but not the trans configuration, are able to reduce reticulocyte depletion in the blood and bone marrow.

[0194] In some embodiments, the Fc polypeptide dimer-antibody variable region fusion proteins provided herein do not substantially deplete reticulocytes (e.g, in bone marrow and/or in circulation). In some embodiments, the Fc polypeptide dimer-antibody variable region fusion proteins do not substantially deplete reticulocytes in vivo. In some embodiments, the amount of reticulocytes depleted after administering the Fc polypeptide dimer-antibody variable region fusion protein is less than an amount of reticulocytes depleted after administering a control. In some embodiments, the control is a corresponding TfR-binding polypeptide dimer-antibody variable region fusion protein with full effector function and/or contains no mutations that reduce FcγR binding. In some instances, the control is an Fc polypeptide dimer-antibody variable region fusion protein in which the first Fc polypeptide comprises the amino acid sequence set forth in SEQ ID NO:1, 3, 5, 7, 9, 11, 13, 15, 17, 19, 21, 23, 29, 31, 33, 35, 37, 39, 41, 43, 45, 47, 49, 51, 81, 83, 85, 87, 89, 91, 93, 95, 258, 260, 262, 264, 266, 268, 270, 272, 274, 276, 278, or 280 (i.e., a first Fc polypeptide that specifically binds TfR comprising a TfR-binding site but contains no LALA substitutions or other modifications that reduce FcγR binding) and the second Fc polypeptide does not contain a TfR-binding site or any modifications that reduce FcγR binding.

[0195] In some embodiments, the Fc polypeptide dimer-antibody variable region fusion protein comprises: (a) an antibody variable region that is capable of binding HER2 (e.g., subdomain II or IV of HER2), or an antigen-binding fragment thereof, and (b) a modified Fc polypeptide dimer comprising a first Fc polypeptide that contains modifications that create a TfR-binding site. In some embodiments, the modified Fc polypeptide dimer comprises a second Fc polypeptide that does not contain a TfR-binding site. In some embodiments, the first Fc polypeptide includes amino acid modifications that reduce FcγR binding when bound to TfR. In some embodiments, the second Fc polypeptide includes amino acid modifications that reduce FcγR binding when bound to TfR. In some embodiments, the first and second Fc polypeptides include amino acid modifications that reduce FcγR binding when bound to TfR. In some embodiments, the first and/or second Fc polypeptides include amino acid modifications that reduce FcγR binding when bound to TfR. In some embodiments, the amino acid modifications that reduce FcγR binding when bound to TfR comprise Ala at position 234 and at position 235, according to EU numbering.

[0196] In some embodiments, the first and/or second Fc polypeptides comprise amino acid modifications that increase serum half-life. In some embodiments, the first Fc polypeptide comprises amino acid modifications that increase serum half-life. In some embodiments, the second Fc polypeptide comprises amino acid modifications that increase serum half-life. In some embodiments, the first and second Fc polypeptides comprise amino acid modifications that increase serum half-life. In some embodiments, the amino acid modifications that increase serum half-life comprise (i) a Leu at position 428 and a Ser at position 434, or (ii) a Ser or Ala at position 434, according to EU numbering.

[0197] In some embodiments, the antibody variable region forms part of a Fab domain.

[0198] Anti-HER2 Variable Regions

[0199] Anti-HER2 DIV

[0200] In some embodiments, the antibody variable region comprises one or more complementarity determining regions (CDRs) selected from the group consisting of: (a) a heavy chain CDR1 having at least 90% sequence identity to the amino acid sequence of SEQ ID NO:69 or having up to two amino acid substitutions relative to the amino acid sequence of SEQ ID NO:69; (b) a heavy chain CDR2 having at least 90% sequence identity to the amino acid sequence of SEQ ID NO:70 or having up to two amino acid substitutions relative to the amino acid sequence of SEQ ID NO:70; (c) a heavy chain CDR3 having at least 90% sequence identity to the amino acid sequence of SEQ ID NO:71 or having up to two amino acid substitutions relative to the amino acid sequence of SEQ ID NO:71; (d) a light chain CDR1 having at least 90% sequence identity to the amino acid sequence of SEQ ID NO:72 or having up to two amino acid substitutions relative to the amino acid sequence of SEQ ID NO:72; (e) a light chain CDR2 having up to two amino acid substitutions relative to the amino acid sequence of SEQ ID NO:73; and (f) a light chain CDR3 having up to two amino acid substitutions relative to the amino acid sequence of SEQ ID NO:74.

[0201] In some embodiments, the antibody variable region comprises two, three, four, five, or all six of (a)-(f). In some embodiments, the antibody variable region comprises the heavy chain CDR1 of (a), the heavy chain CDR2 of (b), and the heavy chain CDR3 of (c). In some embodiments, the antibody variable region comprises the light chain CDR1 of (d), the light chain CDR2 of (e), and the light chain CDR3 of (f). In some embodiments, a CDR having up to two amino acid substitutions has one amino acid substitution relative to the reference sequence. In some embodiments, a CDR having up to two amino acid substitutions has two amino acid substitutions relative to the reference sequence. In some embodiments, the up to two amino acid substitutions are conservative substitutions.

[0202] In some embodiments, the antibody variable region comprises one or more CDRs selected from the group consisting of: (a) a heavy chain CDR1 comprising the amino acid sequence of SEQ ID NO:69; (b) a heavy chain CDR2 comprising the amino acid sequence of SEQ ID NO:70; (c) a heavy chain CDR3 comprising the amino acid sequence of SEQ ID NO:71; (d) a light chain CDR1 comprising the amino acid sequence of SEQ ID NO:72; (e) a light chain CDR2 comprising the amino acid sequence of SEQ ID NO:73; and (f) a light chain CDR3 comprising the amino acid sequence of SEQ ID NO:74.

[0203] In some embodiments, the antibody variable region comprises two, three, four, five, or all six of (a)-(f). In some embodiments, the antibody variable region comprises the heavy chain CDR1 of (a), the heavy chain CDR2 of (b), and the heavy chain CDR3 of (c). In some embodiments, the antibody variable region comprises the light chain CDR1 of (d), the light chain CDR2 of (e), and the light chain CDR3 of (f).

[0204] In some embodiments, the antibody variable region comprises: (a) a heavy chain variable region comprising (i) at least 75% sequence identity (e.g., at least 80%, at least 85%, at least 90%, at least 91%, at least 92%, at least 93%, at least 94%, at least 95%, at least 96%, at least 97%, at least 98%, or at least 99% sequence identity) to SEQ ID NO:59 and (ii) a CDR-H1, CDR-H2, and CDR-H3 that is identical to SEQ ID NOs:69, 70, and 71, respectively; and/or (b) a light chain variable region comprising (i) at least 75% sequence identity (e.g., at least 80%, at least 85%, at least 90%, at least 91%, at least 92%, at least 93%, at least 94%, at least 95%, at least 96%, at least 97%, at least 98%, or at least 99% sequence identity) to SEQ ID NO:60 and (ii) a CDR-L1, CDR-L2, and CDR-L3 that is identical to SEQ ID NOs:72, 73, and 74, respectively.

[0205] In some embodiments, the antibody variable region comprises a heavy chain variable region comprising an amino acid sequence that has at least 90% sequence identity (e.g., at least 91%, at least 92%, at least 93%, at least 94%, at least 95%, at least 96%, at least 97%, at least 98%, or at least 99% sequence identity) to SEQ ID NO:59. In some embodiments, the antibody variable region comprises a heavy chain variable region comprising the amino acid sequence of SEQ ID NO:59.

[0206] In some embodiments, the antibody variable region comprises a light chain variable region comprising an amino acid sequence that has at least 90% sequence identity (e.g., at least 91%, at least 92%, at least 93%, at least 94%, at least 95%, at least 96%, at least 97%, at least 98%, or at least 99% sequence identity) to SEQ ID NO:60. In some embodiments, the antibody variable region comprises a light chain variable region comprising the amino acid sequence of SEQ ID NO:60.

[0207] In some embodiments, the antibody variable region comprises two antibody heavy chain variable regions comprising the amino acid sequence of SEQ ID NO:59 and two light chain variable regions comprising the amino acid sequence of SEQ ID NO:60.

[0208] Anti-HER2_DII

[0209] In some embodiments, the antibody variable region comprises one or more complementarity determining regions (CDRs) selected from the group consisting of: (a) a heavy chain CDR1 having at least 90% sequence identity to the amino acid sequence of SEQ ID NO:75 or having up to two amino acid substitutions relative to the amino acid sequence of SEQ ID NO:75; (b) a heavy chain CDR2 having at least 90% sequence identity to the amino acid sequence of SEQ ID NO:76 or having up to two amino acid substitutions relative to the amino acid sequence of SEQ ID NO:76; (c) a heavy chain CDR3 having at least 90% sequence identity to the amino acid sequence of SEQ ID NO:77 or having up to two amino acid substitutions relative to the amino acid sequence of SEQ ID NO:77; (d) a light chain CDR1 having at least 90% sequence identity to the amino acid sequence of SEQ ID NO:78 or having up to two amino acid substitutions relative to the amino acid sequence of SEQ ID NO:78; (e) a light chain CDR2 having up to two amino acid substitutions relative to the amino acid sequence of SEQ ID NO:79; and (f) a light chain CDR3 having up to two amino acid substitutions relative to the amino acid sequence of SEQ ID NO:80.

[0210] In some embodiments, the antibody variable region comprises two, three, four, five, or all six of (a)-(f). In some embodiments, the antibody variable region comprises the heavy chain CDR1 of (a), the heavy chain CDR2 of (b), and the heavy chain CDR3 of (c). In some embodiments, the antibody variable region comprises the light chain CDR1 of (d), the light chain CDR2 of (e), and the light chain CDR3 of (f). In some embodiments, a CDR having up to two amino acid substitutions has one amino acid substitution relative to the reference sequence. In some embodiments, a CDR having up to two amino acid substitutions has two amino acid substitutions relative to the reference sequence. In some embodiments, the up to two amino acid substitutions are conservative substitutions.

[0211] In some embodiments, the antibody variable region comprises one or more CDRs selected from the group consisting of: (a) a heavy chain CDR1 comprising the amino acid sequence of SEQ ID NO:75; (b) a heavy chain CDR2 comprising the amino acid sequence of SEQ ID NO:76; (c) a heavy chain CDR3 comprising the amino acid sequence of SEQ ID NO:77; (d) a light chain CDR1 comprising the amino acid sequence of SEQ ID NO:78; (e) a light chain CDR2 comprising the amino acid sequence of SEQ ID NO:79; and (f) a light chain CDR3 comprising the amino acid sequence of SEQ ID NO: 80.

[0212] In some embodiments, the antibody variable region comprises two, three, four, five, or all six of (a)-(f). In some embodiments, the antibody variable region comprises the heavy chain CDR1 of (a), the heavy chain CDR2 of (b), and the heavy chain CDR3 of (c). In some embodiments, the antibody variable region comprises the light chain CDR1 of (d), the light chain CDR2 of (e), and the light chain CDR3 of (f).

[0213] In some embodiments, the antibody variable region comprises: (a) a heavy chain variable region comprising (i) at least 75% sequence identity (e.g., at least 80%, at least 85%, at least 90%, at least 91%, at least 92%, at least 93%, at least 94%, at least 95%, at least 96%, at least 97%, at least 98%, or at least 99% sequence identity) to SEQ ID NO:61 and (ii) a CDR-H1, CDR-H2, and CDR-H3 that is identical to SEQ ID NOs:75, 76, and 77, respectively; and/or (b) a light chain variable region comprising (i) at least 75% sequence identity (e.g., at least 80%, at least 85%, at least 90%, at least 91%, at least 92%, at least 93%, at least 94%, at least 95%, at least 96%, at least 97%, at least 98%, or at least 99% sequence identity) to SEQ ID NO:62 and (ii) a CDR-L1, CDR-L2, and CDR-L3 that is identical to SEQ ID NOs:78, 79, and 80, respectively.

[0214] In some embodiments, the antibody variable region comprises a heavy chain variable region comprising an amino acid sequence that has at least 90% sequence identity (e.g., at least 91%, at least 92%, at least 93%, at least 94%, at least 95%, at least 96%, at least 97%, at least 98%, or at least 99% sequence identity) to SEQ ID NO:61. In some embodiments, the antibody variable region comprises a heavy chain variable region comprising the amino acid sequence of SEQ ID NO:61.

[0215] In some embodiments, the antibody variable region comprises a light chain variable region comprising an amino acid sequence that has at least 90% sequence identity (e.g., at least 91%, at least 92%, at least 93%, at least 94%, at least 95%, at least 96%, at least 97%, at least 98%, or at least 99% sequence identity) to SEQ ID NO:62. In some embodiments, the antibody variable region comprises a light chain variable region comprising the amino acid sequence of SEQ ID NO:62.

[0216] In some embodiments, the antibody variable region comprises two antibody heavy chain variable regions comprising the amino acid sequence of SEQ ID NO:61 and two light chain variable regions comprising the amino acid sequence of SEQ ID NO:62.

[0217] Anti-HER2_DI

[0218] In some embodiments, the antibody variable region comprises one or more complementarity determining regions (CDRs) selected from the group consisting of: (a) a heavy chain CDR1 having at least 90% sequence identity to the amino acid sequence of SEQ ID NO:250 or having up to two amino acid substitutions relative to the amino acid sequence of SEQ ID NO:250; (b) a heavy chain CDR2 having at least 90% sequence identity to the amino acid sequence of SEQ ID NO:251 or having up to two amino acid substitutions relative to the amino acid sequence of SEQ ID NO:251; (c) a heavy chain CDR3 having at least 90% sequence identity to the amino acid sequence of SEQ ID NO:252 or having up to two amino acid substitutions relative to the amino acid sequence of SEQ ID NO:252; (d) a light chain CDR1 having at least 90% sequence identity to the amino acid sequence of SEQ ID NO:253 or having up to two amino acid substitutions relative to the amino acid sequence of SEQ ID NO:253; (e) a light chain CDR2 having up to two amino acid substitutions relative to the amino acid sequence of SEQ ID NO:254; and (f) a light chain CDR3 having up to two amino acid substitutions relative to the amino acid sequence of SEQ ID NO:255.

[0219] In some embodiments, the antibody variable region comprises two, three, four, five, or all six of (a)-(f). In some embodiments, the antibody variable region comprises the heavy chain CDR1 of (a), the heavy chain CDR2 of (b), and the heavy chain CDR3 of (c). In some embodiments, the antibody variable region comprises the light chain CDR1 of (d), the light chain CDR2 of (e), and the light chain CDR3 of (f). In some embodiments, a CDR having up to two amino acid substitutions has one amino acid substitution relative to the reference sequence. In some embodiments, a CDR having up to two amino acid substitutions has two amino acid substitutions relative to the reference sequence. In some embodiments, the up to two amino acid substitutions are conservative substitutions.

[0220] In some embodiments, the antibody variable region comprises one or more CDRs selected from the group consisting of: (a) a heavy chain CDR1 comprising the amino acid sequence of SEQ ID NO:250; (b) a heavy chain CDR2 comprising the amino acid sequence of SEQ ID NO:251; (c) a heavy chain CDR3 comprising the amino acid sequence of SEQ ID NO:252; (d) a light chain CDR1 comprising the amino acid sequence of SEQ ID NO:253; (e) a light chain CDR2 comprising the amino acid sequence of SEQ ID NO:254; and (f) a light chain CDR3 comprising the amino acid sequence of SEQ ID NO:255.

[0221] In some embodiments, the antibody variable region comprises two, three, four, five, or all six of (a)-(f). In some embodiments, the antibody variable region comprises the heavy chain CDR1 of (a), the heavy chain CDR2 of (b), and the heavy chain CDR3 of (c). In some embodiments, the antibody variable region comprises the light chain CDR1 of (d), the light chain CDR2 of (e), and the light chain CDR3 of (f).

[0222] In some embodiments, the antibody variable region comprises: (a) a heavy chain variable region comprising (i) at least 75% sequence identity (e.g., at least 80%, at least 85%, at least 90%, at least 91%, at least 92%, at least 93%, at least 94%, at least 95%, at least 96%, at least 97%, at least 98%, or at least 99% sequence identity) to SEQ ID NO:256 and (ii) a CDR-H1, CDR-H2, and CDR-H3 that is identical to SEQ ID NOs:250, 251, and 252, respectively; and/or (b) a light chain variable region comprising (i) at least 75% sequence identity (e.g., at least 80%, at least 85%, at least 90%, at least 91%, at least 92%, at least 93%, at least 94%, at least 95%, at least 96%, at least 97%, at least 98%, or at least 99% sequence identity) to SEQ ID NO:257 and (ii) a CDR-L1, CDR-L2, and CDR-L3 that is identical to SEQ ID NOs:253, 254, and 255, respectively.

[0223] In some embodiments, the antibody variable region comprises a heavy chain variable region comprising an amino acid sequence that has at least 90% sequence identity (e.g., at least 91%, at least 92%, at least 93%, at least 94%, at least 95%, at least 96%, at least 97%, at least 98%, or at least 99% sequence identity) to SEQ ID NO:256. In some embodiments, the antibody variable region comprises a heavy chain variable region comprising the amino acid sequence of SEQ ID NO:256.

[0224] In some embodiments, the antibody variable region comprises a light chain variable region comprising an amino acid sequence that has at least 90% sequence identity (e.g., at least 91%, at least 92%, at least 93%, at least 94%, at least 95%, at least 96%, at least 97%, at least 98%, or at least 99% sequence identity) to SEQ ID NO:257. In some embodiments, the antibody variable region comprises a light chain variable region comprising the amino acid sequence of SEQ ID NO:257.

[0225] In some embodiments, the antibody variable region comprises two antibody heavy chain variable regions comprising the amino acid sequence of SEQ ID NO:256 and two light chain variable regions comprising the amino acid sequence of SEQ ID NO:257.

[0226] Illustrative Fc Polypeptide Dimer-Antibody Variable Region Fusion Proteins

[0227] Fc polypeptide dimer-antibody variable region fusion proteins described herein can comprise any combination of the anti-HER2 variable regions described above. In some embodiments, the first Fc polypeptide comprises a TfR-binding site that comprises a modified CH3 domain. Non-limiting examples of modified CH3 domains that can be used in compositions and methods are described herein in the section titled “TfR-Binding Fc Polypeptides.” In some embodiments, the first Fc polypeptide further comprises a knob mutation T366W and the second Fc polypeptide comprises hole mutations T366S, L368A, and Y407V, according to EU numbering. In some embodiments, the first Fc polypeptide comprises an amino acid sequence having at least about 80%, 85%, 90%, 95,%, 96%, 97%, 98%, or 99% identity to SEQ ID NO:63. In some instances, the first Fc polypeptide comprises the amino acid sequence of SEQ ID NO:63. In some embodiments, the second Fc polypeptide comprises an amino acid sequence having at least about 80%, 85%, 90%, 95,%, 96%, 97%, 98%, or 99% identity to SEQ ID NO:67 or 68. In some instances, the second Fc polypeptide comprises the amino acid sequence of any one of SEQ ID NOS:67 and 68.

[0228] In some embodiments, the first Fc polypeptide further comprises hole mutations T366S, L368A, and Y407V and the second Fc polypeptide comprises a knob mutation T366W, according to EU numbering. In some embodiments, the first Fc polypeptide comprises an amino acid sequence having at least about 80%, 85%, 90%, 95,%, 96%, 97%, 98%, or 99% identity to SEQ ID NO:64. In some instances, the first Fc polypeptide comprises the amino acid sequence of SEQ ID NO:64. In some embodiments, the second Fc polypeptide comprises an amino acid sequence having at least about 80%, 85%, 90%, 95,%, 96%, 97%, 98%, or 99% identity to SEQ ID NO:65 or 66. In some instances, the second FC polypeptide comprises the amino acid sequence of any one of SEQ ID NOS:65 and 66.

[0229] In some embodiments, an Fc polypeptide dimer-antibody variable region fusion protein comprises: (a) an antibody variable region that is capable of binding HER2 (e.g., human HER2), or an antigen-binding fragment thereof, (b) a first Fc polypeptide that contains modifications that create a TfR-binding site, amino acid modifications L234A and L235A, and a knob mutation T366W, according to EU numbering, and (c) a second Fc polypeptide that comprises hole mutations T366S, L368A, and Y407V, according to EU numbering, and does not contain a TfR-binding site or any modifications that reduce FcγR binding.

[0230] In some embodiments, the Fc polypeptide dimer-antibody variable region fusion protein comprises a first heavy chain comprising the amino acid sequence of any one of SEQ ID NOS:2, 10, 18, and 82. In some embodiments, the Fc polypeptide dimer-antibody variable region fusion protein comprises a second heavy chain comprising the amino acid sequence of SEQ ID NO:27. In some embodiments, the Fc polypeptide dimer-antibody variable region fusion protein comprises two light chains comprising the amino acid sequence of SEQ ID NO:57.

[0231] In some embodiments, the Fc polypeptide dimer-antibody variable region fusion protein comprises a first heavy chain comprising the amino acid sequence of any one of SEQ ID NOS:30, 38, 46, and 90. In some embodiments, the Fc polypeptide dimer-antibody variable region fusion protein comprises a second heavy chain comprising the amino acid sequence of SEQ ID NO:55. In some embodiments, the Fc polypeptide dimer-antibody variable region fusion protein comprises two light chains comprising the amino acid sequence of SEQ ID NO:58.

[0232] In some embodiments, the Fc polypeptide dimer-antibody variable region fusion protein comprises a first heavy chain comprising the amino acid sequence of any one of SEQ ID NOS:259, 267, 275, and 283. In some embodiments, the Fc polypeptide dimer-antibody variable region fusion protein comprises a second heavy chain comprising the amino acid sequence of SEQ ID NO:290. In some embodiments, the Fc polypeptide dimer-antibody variable region fusion protein comprises two light chains comprising the amino acid sequence of SEQ ID NO:293.

[0233] In some embodiments, an Fc polypeptide dimer-antibody variable region fusion protein comprises: (a) an antibody variable region that is capable of binding HER2 (e.g., human HER2), or an antigen-binding fragment thereof, (b) a first Fc polypeptide that contains modifications that create a TfR-binding site, amino acid modifications L234A and L235A, a knob mutation T366W, and amino acid modification N434S with or without M428L, according to EU numbering, and (c) a second Fc polypeptide that comprises hole mutations T366S, L368A, and Y407V, according to EU numbering, and does not contain a TfR-binding site.

[0234] In some embodiments, the Fc polypeptide dimer-antibody variable region fusion protein comprises a first heavy chain comprising the amino acid sequence of any one of SEQ ID NOS:4, 12, 20, and 84. In some embodiments, the Fc polypeptide dimer-antibody variable region fusion protein comprises a second heavy chain comprising the amino acid sequence of SEQ ID NO:27. In some embodiments, the Fc polypeptide dimer-antibody variable region fusion protein comprises two light chains comprising the amino acid sequence of SEQ ID NO:57.

[0235] In some embodiments, the Fc polypeptide dimer-antibody variable region fusion protein comprises a first heavy chain comprising the amino acid sequence of any one of SEQ ID NOS:32, 40, 48, and 92. In some embodiments, the Fc polypeptide dimer-antibody variable region fusion protein comprises a second heavy chain comprising the amino acid sequence of SEQ ID NO:55. In some embodiments, the Fc polypeptide dimer-antibody variable region fusion protein comprises two light chains comprising the amino acid sequence of SEQ ID NO:58.

[0236] In some embodiments, the Fc polypeptide dimer-antibody variable region fusion protein comprises a first heavy chain comprising the amino acid sequence of any one of SEQ ID NOS:261, 269, 277, and 285. In some embodiments, the Fc polypeptide dimer-antibody variable region fusion protein comprises a second heavy chain comprising the amino acid sequence of SEQ ID NO:290. In some embodiments, the Fc polypeptide dimer-antibody variable region fusion protein comprises two light chains comprising the amino acid sequence of SEQ ID NO:293.

[0237] In some embodiments, an Fc polypeptide dimer-antibody variable region fusion protein comprises: (a) an antibody variable region that is capable of binding HER2 (e.g., human HER2), or an antigen-binding fragment thereof, (b) a first Fc polypeptide that contains modifications that create a TfR-binding site, amino acid modifications L234A and L235A, and a knob mutation T366W, according to EU numbering, and (c) a second Fc polypeptide that comprises hole mutations T366S, L368A, and Y407V and amino acid modification N434S with or without M428L, according to EU numbering, and does not contain a TfR-binding site.

[0238] In some embodiments, the Fc polypeptide dimer-antibody variable region fusion protein comprises a first heavy chain comprising the amino acid sequence of any one of SEQ ID NOS:2, 10, 18, and 82. In some embodiments, the Fc polypeptide dimer-antibody variable region fusion protein comprises a second heavy chain comprising the amino acid sequence of SEQ ID NO:28. In some embodiments, the Fc polypeptide dimer-antibody variable region fusion protein comprises two light chains comprising the amino acid sequence of SEQ ID NO:57.

[0239] In some embodiments, the Fc polypeptide dimer-antibody variable region fusion protein comprises a first heavy chain comprising the amino acid sequence of any one of SEQ ID NOS:30, 38, 46, and 90. In some embodiments, the Fc polypeptide dimer-antibody variable region fusion protein comprises a second heavy chain comprising the amino acid sequence of SEQ ID NO:56. In some embodiments, the Fc polypeptide dimer-antibody variable region fusion protein comprises two light chains comprising the amino acid sequence of SEQ ID NO:58.

[0240] In some embodiments, the Fc polypeptide dimer-antibody variable region fusion protein comprises a first heavy chain comprising the amino acid sequence of any one of SEQ ID NOS:259, 267, 275, and 283. In some embodiments, the Fc polypeptide dimer-antibody variable region fusion protein comprises a second heavy chain comprising the amino acid sequence of SEQ ID NO:291. In some embodiments, the Fc polypeptide dimer-antibody variable region fusion protein comprises two light chains comprising the amino acid sequence of SEQ ID NO:293.

[0241] In some embodiments, an Fc polypeptide dimer-antibody variable region fusion protein comprises: (a) an antibody variable region that is capable of binding HER2 (e.g., human HER2), or an antigen-binding fragment thereof, (b) a first Fc polypeptide that contains modifications that create a TfR-binding site, amino acid modifications L234A and L235A, a knob mutation T366W, and amino acid modification N434S with or without M428L, according to EU numbering, and (c) a second Fc polypeptide that comprises hole mutations T366S, L368A, and Y407V and amino acid modification N434S with or without M428L, according to EU numbering, and does not contain a TfR-binding site.

[0242] In some embodiments, the Fc polypeptide dimer-antibody variable region fusion protein comprises a first heavy chain comprising the amino acid sequence of any one of SEQ ID NOS:4, 12, 20, and 84. In some embodiments, the Fc polypeptide dimer-antibody variable region fusion protein comprises a second heavy chain comprising the amino acid sequence of SEQ ID NO:28. In some embodiments, the Fc polypeptide dimer-antibody variable region fusion protein comprises two light chains comprising the amino acid sequence of SEQ ID NO:57.

[0243] In some embodiments, the Fc polypeptide dimer-antibody variable region fusion protein comprises a first heavy chain comprising the amino acid sequence of any one of SEQ ID NOS:32, 40, 48, and 92. In some embodiments, the Fc polypeptide dimer-antibody variable region fusion protein comprises a second heavy chain comprising the amino acid sequence of SEQ ID NO:56. In some embodiments, the Fc polypeptide dimer-antibody variable region fusion protein comprises two light chains comprising the amino acid sequence of SEQ ID NO:58.

[0244] In some embodiments, the Fc polypeptide dimer-antibody variable region fusion protein comprises a first heavy chain comprising the amino acid sequence of any one of SEQ ID NOS:261, 269, 277, and 285. In some embodiments, the Fc polypeptide dimer-antibody variable region fusion protein comprises a second heavy chain comprising the amino acid sequence of SEQ ID NO:291. In some embodiments, the Fc polypeptide dimer-antibody variable region fusion protein comprises two light chains comprising the amino acid sequence of SEQ ID NO:293.

[0245] In some embodiments, an Fc polypeptide dimer-antibody variable region fusion protein comprises: (a) an antibody variable region that is capable of binding HER2 (e.g., human HER2), or an antigen-binding fragment thereof, (b) a first Fc polypeptide that contains modifications that create a TfR-binding site, amino acid modifications L234A and L235A, and hole mutations T366S, L368A, and Y407V, according to EU numbering, and (c) a second Fc polypeptide that comprises a knob mutation T366W, according to EU numbering, and does not contain a TfR-binding site.

[0246] In some embodiments, the Fc polypeptide dimer-antibody variable region fusion protein comprises a first heavy chain comprising the amino acid sequence of any one of SEQ ID NOS:6, 14, 22, and 86. In some embodiments, he Fc polypeptide dimer-antibody variable region fusion protein comprises a second heavy chain comprising the amino acid sequence of SEQ ID NO:25. In some embodiments, the Fc polypeptide dimer-antibody variable region fusion protein comprises two light chains comprising the amino acid sequence of SEQ ID NO:57.

[0247] In some embodiments, the Fc polypeptide dimer-antibody variable region fusion protein comprises a first heavy chain comprising the amino acid sequence of any one of SEQ ID NOS:34, 42, 50, and 94. In some embodiments, the Fc polypeptide dimer-antibody variable region fusion protein comprises a second heavy chain comprising the amino acid sequence of SEQ ID NO:53. In some embodiments, the Fc polypeptide dimer-antibody variable region fusion protein comprises two light chains comprising the amino acid sequence of SEQ ID NO:58.

[0248] In some embodiments, the Fc polypeptide dimer-antibody variable region fusion protein comprises a first heavy chain comprising the amino acid sequence of any one of SEQ ID NOS:263, 271, 279, and 287. In some embodiments, he Fc polypeptide dimer-antibody variable region fusion protein comprises a second heavy chain comprising the amino acid sequence of SEQ ID NO:294. In some embodiments, the Fc polypeptide dimer-antibody variable region fusion protein comprises two light chains comprising the amino acid sequence of SEQ ID NO:293.

[0249] In some embodiments, an Fc polypeptide dimer-antibody variable region fusion protein comprises: (a) an antibody variable region that is capable of binding HER2 (e.g., human HER2), or an antigen-binding fragment thereof, (b) a first Fc polypeptide that contains modifications that create a TfR-binding site, amino acid modifications L234A and L235A, hole mutations T366S, L368A, and Y407V, and amino acid modification N434S with or without M428L, according to EU numbering, and (c) a second Fc polypeptide that comprises a knob mutation T366W, according to EU numbering, and does not contain a TfR-binding site.

[0250] In some embodiments, the Fc polypeptide dimer-antibody variable region fusion protein comprises a first heavy chain comprising the amino acid sequence of any one of SEQ ID NOS:8, 16, 24, and 88. In some embodiments, the Fc polypeptide dimer-antibody variable region fusion protein comprises a second heavy chain comprising the amino acid sequence of SEQ ID NO:25. In some embodiments, the Fc polypeptide dimer-antibody variable region fusion protein comprises two light chains comprising the amino acid sequence of SEQ ID NO:57.

[0251] In some embodiments, the Fc polypeptide dimer-antibody variable region fusion protein comprises a first heavy chain comprising the amino acid sequence of any one of SEQ ID NOS:36, 44, 52, and 96. In some embodiments, the Fc polypeptide dimer-antibody variable region fusion protein comprises a second heavy chain comprising the amino acid sequence of SEQ ID NO:53. In some embodiments, the Fc polypeptide dimer-antibody variable region fusion protein comprises two light chains comprising the amino acid sequence of SEQ ID NO:58.

[0252] In some embodiments, the Fc polypeptide dimer-antibody variable region fusion protein comprises a first heavy chain comprising the amino acid sequence of any one of SEQ ID NOS:265, 273, 281, and 289. In some embodiments, the Fc polypeptide dimer-antibody variable region fusion protein comprises a second heavy chain comprising the amino acid sequence of SEQ ID NO:294. In some embodiments, the Fc polypeptide dimer-antibody variable region fusion protein comprises two light chains comprising the amino acid sequence of SEQ ID NO:293.

[0253] In some embodiments, an Fc polypeptide dimer-antibody variable region fusion protein comprises: (a) an antibody variable region that is capable of binding HER2 (e.g., human HER2), or an antigen-binding fragment thereof, (b) a first Fc polypeptide contains modifications that create a TfR-binding site, amino acid modifications L234A and L235A, and hole mutations T366S, L368A, and Y407V, according to EU numbering, and (c) a second Fc polypeptide that comprises a knob mutation T366W and amino acid modification N434S with or without M428L, according to EU numbering, and does not contain a TfR-binding site.

[0254] In some embodiments, the Fc polypeptide dimer-antibody variable region fusion protein comprises a first heavy chain comprising the amino acid sequence of any one of SEQ ID NOS:6, 14, 22, and 86. In some embodiments, the Fc polypeptide dimer-antibody variable region fusion protein comprises a second heavy chain comprising the amino acid sequence of SEQ ID NO:26. In some embodiments, the Fc polypeptide dimer-antibody variable region fusion protein comprises two light chains comprising the amino acid sequence of SEQ ID NO:57.

[0255] In some embodiments, the Fc polypeptide dimer-antibody variable region fusion protein comprises a first heavy chain comprising the amino acid sequence of any one of SEQ ID NOS:34, 42, 50, and 94. In some embodiments, the Fc polypeptide dimer-antibody variable region fusion protein comprises a second heavy chain comprising the amino acid sequence of SEQ ID NO:54. In some embodiments, the Fc polypeptide dimer-antibody variable region fusion protein comprises two light chains comprising the amino acid sequence of SEQ ID NO:58.

[0256] In some embodiments, the Fc polypeptide dimer-antibody variable region fusion protein comprises a first heavy chain comprising the amino acid sequence of any one of SEQ ID NOS:263, 271, 279, and 287. In some embodiments, the Fc polypeptide dimer-antibody variable region fusion protein comprises a second heavy chain comprising the amino acid sequence of SEQ ID NO:295. In some embodiments, the Fc polypeptide dimer-antibody variable region fusion protein comprises two light chains comprising the amino acid sequence of SEQ ID NO:293.

[0257] In some embodiments, an Fc polypeptide dimer-antibody variable region fusion protein comprises: (a) an antibody variable region that is capable of binding HER2 (e.g., human HER2), or an antigen-binding fragment thereof, (b) a first Fc polypeptide that contains modifications that create a TfR-binding site, amino acid modifications L234A and L235A, hole mutations T366S, L368A, and Y407V, and amino acid modification N434S with or without M428L, according to EU numbering, and (c) a second Fc polypeptide that comprises a knob mutation T366W and amino acid modification N434S with or without M428L, according to EU numbering, and does not contain a TfR-binding site.

[0258] In some embodiments, the Fc polypeptide dimer-antibody variable region fusion protein comprises a first heavy chain comprising the amino acid sequence of any one of SEQ ID NOS:8, 16, 24, and 88. In some embodiments, the Fc polypeptide dimer-antibody variable region fusion protein comprises a second heavy chain comprising the amino acid sequence of SEQ ID NO:26. In some embodiments, the Fc polypeptide dimer-antibody variable region fusion protein comprises two light chains comprising the amino acid sequence of SEQ ID NO:57.

[0259] In some embodiments, the Fc polypeptide dimer-antibody variable region fusion protein comprises a first heavy chain comprising the amino acid sequence of any one of SEQ ID NOS:36, 44, 52, and 96. In some embodiments, the Fc polypeptide dimer-antibody variable region fusion protein comprises a second heavy chain comprising the amino acid sequence of SEQ ID NO:54. In some embodiments, the Fc polypeptide dimer-antibody variable region fusion protein comprises two light chains comprising the amino acid sequence of SEQ ID NO:58.

[0260] In some embodiments, the Fc polypeptide dimer-antibody variable region fusion protein comprises a first heavy chain comprising the amino acid sequence of any one of SEQ ID NOS:265, 273, 281, and 289. In some embodiments, the Fc polypeptide dimer-antibody variable region fusion protein comprises a second heavy chain comprising the amino acid sequence of SEQ ID NO:295. In some embodiments, the Fc polypeptide dimer-antibody variable region fusion protein comprises two light chains comprising the amino acid sequence of SEQ ID NO:293.

[0261] In some embodiments, an Fc polypeptide dimer-antibody variable region fusion protein comprises: (a) an antibody variable region that is capable of binding HER2 (e.g., human HER2), or an antigen-binding fragment thereof, (b) a first Fc polypeptide that contains modifications that create a TfR-binding site and a knob mutation T366W, according to EU numbering, and (c) a second Fc polypeptide that comprises hole mutations T366S, L368A, and Y407V, according to EU numbering, and does not contain a TfR-binding site.

[0262] In some embodiments, the Fc polypeptide dimer-antibody variable region fusion protein comprises a first heavy chain comprising the amino acid sequence of any one of SEQ ID NOS:1, 9, 17, and 81. In some embodiments, the Fc polypeptide dimer-antibody variable region fusion protein comprises a second heavy chain comprising the amino acid sequence of SEQ ID NO:27. In some embodiments, the Fc polypeptide dimer-antibody variable region fusion protein comprises two light chains comprising the amino acid sequence of SEQ ID NO:57.

[0263] In some embodiments, the Fc polypeptide dimer-antibody variable region fusion protein comprises a first heavy chain comprising the amino acid sequence of any one of SEQ ID NOS:29, 37, 45, and 89. In some embodiments, the Fc polypeptide dimer-antibody variable region fusion protein comprises a second heavy chain comprising the amino acid sequence of SEQ ID NO:55. In some embodiments, the Fc polypeptide dimer-antibody variable region fusion protein comprises two light chains comprising the amino acid sequence of SEQ ID NO:58.

[0264] In some embodiments, the Fc polypeptide dimer-antibody variable region fusion protein comprises a first heavy chain comprising the amino acid sequence of any one of SEQ ID NOS:258, 266, 274, and 282. In some embodiments, the Fc polypeptide dimer-antibody variable region fusion protein comprises a second heavy chain comprising the amino acid sequence of SEQ ID NO:290. In some embodiments, the Fc polypeptide dimer-antibody variable region fusion protein comprises two light chains comprising the amino acid sequence of SEQ ID NO:293.

[0265] In some embodiments, an Fc polypeptide dimer-antibody variable region fusion protein comprises: (a) an antibody variable region that is capable of binding HER2 (e.g., human HER2), or an antigen-binding fragment thereof, (b) a first Fc polypeptide that contains modifications that create a TfR-binding site, a knob mutation T366W, and amino acid modification N434S with or without M428L, according to EU numbering, and (c) a second Fc polypeptide that comprises hole mutations T366S, L368A, and Y407V, according to EU numbering, and does not contain a TfR-binding site.

[0266] In some embodiments, the Fc polypeptide dimer-antibody variable region fusion protein comprises a first heavy chain comprising the amino acid sequence of any one of SEQ ID NOS:3, 11, 19, and 83. In some embodiments, the Fc polypeptide dimer-antibody variable region fusion protein comprises a second heavy chain comprising the amino acid sequence of SEQ ID NO:27. In some embodiments, the Fc polypeptide dimer-antibody variable region fusion protein comprises two light chains comprising the amino acid sequence of SEQ ID NO:57.

[0267] In some embodiments, the Fc polypeptide dimer-antibody variable region fusion protein comprises a first heavy chain comprising the amino acid sequence of any one of SEQ ID NOS:31, 39, 47, and 91. In some embodiments, the Fc polypeptide dimer-antibody variable region fusion protein comprises a second heavy chain comprising the amino acid sequence of SEQ ID NO:55. In some embodiments, the Fc polypeptide dimer-antibody variable region fusion protein comprises two light chains comprising the amino acid sequence of SEQ ID NO:58.

[0268] In some embodiments, the Fc polypeptide dimer-antibody variable region fusion protein comprises a first heavy chain comprising the amino acid sequence of any one of SEQ ID NOS:260, 268, 276, and 284. In some embodiments, the Fc polypeptide dimer-antibody variable region fusion protein comprises a second heavy chain comprising the amino acid sequence of SEQ ID NO:290. In some embodiments, the Fc polypeptide dimer-antibody variable region fusion protein comprises two light chains comprising the amino acid sequence of SEQ ID NO:293.

[0269] In some embodiments, an Fc polypeptide dimer-antibody variable region fusion protein comprises: (a) an antibody variable region that is capable of binding HER2 (e.g., human HER2), or an antigen-binding fragment thereof, (b) a first Fc polypeptide that contains modifications that create a TfR-binding site and a knob mutation T366W, according to EU numbering, and (c) a second Fc polypeptide that comprises hole mutations T366S, L368A, and Y407V and amino acid modification N434S with or without M428L, according to EU numbering, and does not contain a TfR-binding site.

[0270] In some embodiments, the Fc polypeptide dimer-antibody variable region fusion protein comprises a first heavy chain comprising the amino acid sequence of any one of SEQ ID NOS:1, 9, 17, and 81. In some embodiments, the Fc polypeptide dimer-antibody variable region fusion protein comprises a second heavy chain comprising the amino acid sequence of SEQ ID NO:28. In some embodiments, the Fc polypeptide dimer-antibody variable region fusion protein comprises two light chains comprising the amino acid sequence of SEQ ID NO:57.

[0271] In some embodiments, the Fc polypeptide dimer-antibody variable region fusion protein comprises a first heavy chain comprising the amino acid sequence of any one of SEQ ID NOS:29, 37, 45, and 89. In some embodiments, the Fc polypeptide dimer-antibody variable region fusion protein comprises a second heavy chain comprising the amino acid sequence of SEQ ID NO:56. In some embodiments, the Fc polypeptide dimer-antibody variable region fusion protein comprises two light chains comprising the amino acid sequence of SEQ ID NO:58.

[0272] In some embodiments, the Fc polypeptide dimer-antibody variable region fusion protein comprises a first heavy chain comprising the amino acid sequence of any one of SEQ ID NOS:258, 266, 274, and 282. In some embodiments, the Fc polypeptide dimer-antibody variable region fusion protein comprises a second heavy chain comprising the amino acid sequence of SEQ ID NO:291. In some embodiments, the Fc polypeptide dimer-antibody variable region fusion protein comprises two light chains comprising the amino acid sequence of SEQ ID NO:293.

[0273] In some embodiments, an Fc polypeptide dimer-antibody variable region fusion protein comprises: (a) an antibody variable region that is capable of binding HER2 (e.g., human HER2), or an antigen-binding fragment thereof, (b) a first Fc polypeptide that contains modifications that create a TfR-binding site, a knob mutation T366W, and amino acid modification N434S with or without M428L, according to EU numbering, and (c) a second Fc polypeptide that comprises hole mutations T366S, L368A, and Y407V and amino acid modification N434S with or without M428L, according to EU numbering, and does not contain a TfR-binding site.

[0274] In some embodiments, the Fc polypeptide dimer-antibody variable region fusion protein comprises a first heavy chain comprising the amino acid sequence of any one of SEQ ID NOS:3, 11, 19, and 83. In some embodiments, the Fc polypeptide dimer-antibody variable region fusion protein comprises a second heavy chain comprising the amino acid sequence of SEQ ID NO:28. In some embodiments, the Fc polypeptide dimer-antibody variable region fusion protein comprises two light chains comprising the amino acid sequence of SEQ ID NO:57.

[0275] In some embodiments, the Fc polypeptide dimer-antibody variable region fusion protein comprises a first heavy chain comprising the amino acid sequence of any one of SEQ ID NOS:31, 39, 47, and 91. In some embodiments, the Fc polypeptide dimer-antibody variable region fusion protein comprises a second heavy chain comprising the amino acid sequence of SEQ ID NO:56. In some embodiments, the Fc polypeptide dimer-antibody variable region fusion protein comprises two light chains comprising the amino acid sequence of SEQ ID NO:58.

[0276] In some embodiments, the Fc polypeptide dimer-antibody variable region fusion protein comprises a first heavy chain comprising the amino acid sequence of any one of SEQ ID NOS:260, 268, 276, and 284. In some embodiments, the Fc polypeptide dimer-antibody variable region fusion protein comprises a second heavy chain comprising the amino acid sequence of SEQ ID NO:291. In some embodiments, the Fc polypeptide dimer-antibody variable region fusion protein comprises two light chains comprising the amino acid sequence of SEQ ID NO:293.

[0277] In some embodiments, an Fc polypeptide dimer-antibody variable region fusion protein comprises: (a) an antibody variable region that is capable of binding HER2 (e.g., human HER2), or an antigen-binding fragment thereof, (b) a first Fc polypeptide that contains modifications that create a TfR-binding site and hole mutations T366S, L368A, and Y407V, according to EU numbering, and (c) a second Fc polypeptide that comprises a knob mutation T366W, according to EU numbering, and does not contain a TfR-binding site.

[0278] In some embodiments, the Fc polypeptide dimer-antibody variable region fusion protein comprises a first heavy chain comprising the amino acid sequence of any one of SEQ ID NOS:5, 13, 21, and 85. In some embodiments, he Fc polypeptide dimer-antibody variable region fusion protein comprises a second heavy chain comprising the amino acid sequence of SEQ ID NO:25. In some embodiments, the Fc polypeptide dimer-antibody variable region fusion protein comprises two light chains comprising the amino acid sequence of SEQ ID NO:57.

[0279] In some embodiments, the Fc polypeptide dimer-antibody variable region fusion protein comprises a first heavy chain comprising the amino acid sequence of any one of SEQ ID NOS:33, 41, 49, and 93. In some embodiments, the Fc polypeptide dimer-antibody variable region fusion protein comprises a second heavy chain comprising the amino acid sequence of SEQ ID NO:53. In some embodiments, the Fc polypeptide dimer-antibody variable region fusion protein comprises two light chains comprising the amino acid sequence of SEQ ID NO:58.

[0280] In some embodiments, the Fc polypeptide dimer-antibody variable region fusion protein comprises a first heavy chain comprising the amino acid sequence of any one of SEQ ID NOS:262, 270, 278, and 286. In some embodiments, he Fc polypeptide dimer-antibody variable region fusion protein comprises a second heavy chain comprising the amino acid sequence of SEQ ID NO:294. In some embodiments, the Fc polypeptide dimer-antibody variable region fusion protein comprises two light chains comprising the amino acid sequence of SEQ ID NO:293.

[0281] In some embodiments, an Fc polypeptide dimer-antibody variable region fusion protein comprises: (a) an antibody variable region that is capable of binding HER2 (e.g., human HER2), or an antigen-binding fragment thereof, (b) a first Fc polypeptide that contains modifications that create a TfR-binding site, hole mutations T366S, L368A, and Y407V, and amino acid modification N434S with or without M428L, according to EU numbering, and (c) a second Fc polypeptide that comprises a knob mutation T366W, according to EU numbering, and does not contain a TfR-binding site.

[0282] In some embodiments, the Fc polypeptide dimer-antibody variable region fusion protein comprises a first heavy chain comprising the amino acid sequence of any one of SEQ ID NOS:7, 15, 23, and 87. In some embodiments, the Fc polypeptide dimer-antibody variable region fusion protein comprises a second heavy chain comprising the amino acid sequence of SEQ ID NO:25. In some embodiments, the Fc polypeptide dimer-antibody variable region fusion protein comprises two light chains comprising the amino acid sequence of SEQ ID NO:57.

[0283] In some embodiments, the Fc polypeptide dimer-antibody variable region fusion protein comprises a first heavy chain comprising the amino acid sequence of any one of SEQ ID NOS:35, 43, 51, and 95. In some embodiments, the Fc polypeptide dimer-antibody variable region fusion protein comprises a second heavy chain comprising the amino acid sequence of SEQ ID NO:53. In some embodiments, the Fc polypeptide dimer-antibody variable region fusion protein comprises two light chains comprising the amino acid sequence of SEQ ID NO:58.

[0284] In some embodiments, the Fc polypeptide dimer-antibody variable region fusion protein comprises a first heavy chain comprising the amino acid sequence of any one of SEQ ID NOS:264, 272, 280, and 288. In some embodiments, the Fc polypeptide dimer-antibody variable region fusion protein comprises a second heavy chain comprising the amino acid sequence of SEQ ID NO:294. In some embodiments, the Fc polypeptide dimer-antibody variable region fusion protein comprises two light chains comprising the amino acid sequence of SEQ ID NO:293.

[0285] In some embodiments, an Fc polypeptide dimer-antibody variable region fusion protein comprises: (a) an antibody variable region that is capable of binding HER2 (e.g., human HER2), or an antigen-binding fragment thereof, (b) a first Fc polypeptide that contains modifications that create a TfR-binding site and hole mutations T366S, L368A, and Y407V, according to EU numbering, and (c) a second Fc polypeptide that comprises a knob mutation T366W and amino acid modification N434S with or without M428L, according to EU numbering, and does not contain a TfR-binding site.

[0286] In some embodiments, the Fc polypeptide dimer-antibody variable region fusion protein comprises a first heavy chain comprising the amino acid sequence of any one of SEQ ID NOS:5, 13, 21, and 85. In some embodiments, the Fc polypeptide dimer-antibody variable region fusion protein comprises a second heavy chain comprising the amino acid sequence of SEQ ID NO:26. In some embodiments, the Fc polypeptide dimer-antibody variable region fusion protein comprises two light chains comprising the amino acid sequence of SEQ ID NO:57.

[0287] In some embodiments, the Fc polypeptide dimer-antibody variable region fusion protein comprises a first heavy chain comprising the amino acid sequence of any one of SEQ ID NOS:33, 41, 49, and 93. In some embodiments, the Fc polypeptide dimer-antibody variable region fusion protein comprises a second heavy chain comprising the amino acid sequence of SEQ ID NO:54. In some embodiments, the Fc polypeptide dimer-antibody variable region fusion protein comprises two light chains comprising the amino acid sequence of SEQ ID NO:58.

[0288] In some embodiments, the Fc polypeptide dimer-antibody variable region fusion protein comprises a first heavy chain comprising the amino acid sequence of any one of SEQ ID NOS:262, 270, 278, and 286. In some embodiments, the Fc polypeptide dimer-antibody variable region fusion protein comprises a second heavy chain comprising the amino acid sequence of SEQ ID NO:295. In some embodiments, the Fc polypeptide dimer-antibody variable region fusion protein comprises two light chains comprising the amino acid sequence of SEQ ID NO:293.

[0289] In some embodiments, an Fc polypeptide dimer-antibody variable region fusion protein comprises: (a) an antibody variable region that is capable of binding HER2 (e.g., human HER2), or an antigen-binding fragment thereof, (b) a first Fc polypeptide that contains modifications that create a TfR-binding site, hole mutations T366S, L368A, and Y407V, and amino acid modification N434S with or without M428L, according to EU numbering, and (c) a second Fc polypeptide that comprises a knob mutation T366W and amino acid modification N434S with or without M428L, according to EU numbering, and does not contain a TfR-binding site.

[0290] In some embodiments, the Fc polypeptide dimer-antibody variable region fusion protein comprises a first heavy chain comprising the amino acid sequence of any one of SEQ ID NOS:7, 15, 23, and 87. In some embodiments, the Fc polypeptide dimer-antibody variable region fusion protein comprises a second heavy chain comprising the amino acid sequence of SEQ ID NO:26. In some embodiments, the Fc polypeptide dimer-antibody variable region fusion protein comprises two light chains comprising the amino acid sequence of SEQ ID NO:57.

[0291] In some embodiments, the Fc polypeptide dimer-antibody variable region fusion protein comprises a first heavy chain comprising the amino acid sequence of any one of SEQ ID NOS:35, 43, 51, and 95. In some embodiments, the Fc polypeptide dimer-antibody variable region fusion protein comprises a second heavy chain comprising the amino acid sequence of SEQ ID NO:54. In some embodiments, the Fc polypeptide dimer-antibody variable region fusion protein comprises two light chains comprising the amino acid sequence of SEQ ID NO:58.

[0292] In some embodiments, the Fc polypeptide dimer-antibody variable region fusion protein comprises a first heavy chain comprising the amino acid sequence of any one of SEQ ID NOS:264, 272, 280, and 288. In some embodiments, the Fc polypeptide dimer-antibody variable region fusion protein comprises a second heavy chain comprising the amino acid sequence of SEQ ID NO:295. In some embodiments, the Fc polypeptide dimer-antibody variable region fusion protein comprises two light chains comprising the amino acid sequence of SEQ ID NO:293.

[0293] Antibody Heavy Chains

[0294] In other aspects, provided herein are antibody heavy chains. In some embodiments, the antibody heavy chains comprise: (a) an anti-HER2 (e.g., human HER2) antibody heavy chain variable region, or a fragment thereof; and (b) a modified Fc polypeptide that contains modifications that create a TfR-binding site. The antibody heavy chains can comprise any of the anti-HER2 variable heavy chain CDR and/or heavy chain variable region sequences described above in the section titled “Anti-HER2 Variable Regions.” The modified Fc polypeptide can comprise any of the TfR-binding sites (e.g., modified CH3 domains) described herein and/or any of the modifications that increase serum half-life or reduce FcγR binding (e.g., when bound to TfR) described herein.

[0295] In some embodiments, the modified Fc polypeptide further comprises a knob mutation T366W, according to EU numbering. In some embodiments, the modified polypeptide comprises an amino acid sequence having at least about 80%, 85%, 90%, 95,%, 96%, 97%, 98%, or 99% identity to SEQ ID NO:63. In some instances, the modified Fc polypeptide comprises the amino acid sequence of SEQ ID NO:63. In some embodiments, the modified Fc polypeptide further comprises hole mutations T366S, L368A, and Y407V, according to EU numbering. In some embodiments, the modified polypeptide comprises an amino acid sequence having at least about 80%, 85%, 90%, 95,%, 96%, 97%, 98%, or 99% identity to SEQ ID NO:64. In some instances, the modified Fc polypeptide comprises the amino acid sequence of SEQ ID NO:64.

[0296] In some embodiments, the antibody heavy chain comprises: (a) an anti-HER2 (e.g., human HER2) antibody heavy chain variable region, or a fragment thereof, and (b) a modified Fc polypeptide that contains modifications that create a TfR-binding site, amino acid modifications L234A and L235A, and a knob mutation T366W, according to EU numbering. In some embodiments, the antibody heavy chain comprises the amino acid sequence of any one of SEQ ID NOS:2, 10, 18, and 82. In some embodiments, the antibody heavy chain comprises the amino acid sequence of any one of SEQ ID NOS:30, 38, 46, and 90. In some embodiments, the antibody heavy chain comprises the amino acid sequence of any one of SEQ ID NOS:259, 267, 275, and 283.

[0297] In some embodiments, the antibody heavy chain comprises: (a) an anti-HER2 (e.g., human HER2) antibody heavy chain variable region, or a fragment thereof, and (b) a modified Fc polypeptide that contains modifications that create a TfR-binding site, amino acid modifications L234A and L235A, a knob mutation T366W, and amino acid modification N434S with or without M428L, according to EU numbering. In some embodiments, the antibody heavy chain comprises the amino acid sequence of any one of SEQ ID NOS:4, 12, 20, and 84. In some embodiments, the antibody heavy chain comprises the amino acid sequence of any one of SEQ ID NOS:32, 40, 48, and 92. In some embodiments, the antibody heavy chain comprises the amino acid sequence of any one of SEQ ID NOS:261, 269, 277, and 285.

[0298] In some embodiments, the antibody heavy chain comprises: (a) an anti-HER2 (e.g., human HER2) antibody heavy chain variable region, or a fragment thereof, and (b) a modified Fc polypeptide that contains modifications that create a TfR-binding site, amino acid modifications L234A and L235A, and hole mutations T366S, L368A, and Y407V, according to EU numbering. In some embodiments, the antibody heavy chain comprises the amino acid sequence of any one of SEQ ID NOS: NOS:6, 14, 22, and 86. In some embodiments, the antibody heavy chain comprises the amino acid sequence of any one of SEQ ID NOS:34, 42, 50, and 94. In some embodiments, the antibody heavy chain comprises the amino acid sequence of any one of SEQ ID NOS:263, 271, 279, and 287.

[0299] In some embodiments, the antibody heavy chain comprises: (a) an anti-HER2 (e.g., human HER2) antibody heavy chain variable region, or a fragment thereof, and (b) a modified Fc polypeptide that contains modifications that create a TfR-binding site, amino acid modifications L234A and L235A, hole mutations T366S, L368A, and Y407V, and amino acid modification N434S with or without M428L, according to EU numbering. In some embodiments, the antibody heavy chain comprises the amino acid sequence of any one of SEQ ID NOS:8, 16, 24, and 88. In some embodiments, the antibody heavy chain comprises the amino acid sequence of any one of SEQ ID NOS:36, 44, 52, and 96. In some embodiments, the antibody heavy chain comprises the amino acid sequence of any one of SEQ ID NOS:265, 273, 281, and 289.

[0300] In some embodiments, the antibody heavy chain comprises: (a) an anti-HER2 (e.g., human HER2) antibody heavy chain variable region, or a fragment thereof, and (b) a modified Fc polypeptide that contains modifications that create a TfR-binding site and a knob mutation T366W, according to EU numbering. In some embodiments, the antibody heavy chain comprises the amino acid sequence of any one of SEQ ID NOS:1, 9, 17, and 81. In some embodiments, the antibody heavy chain comprises the amino acid sequence of any one of SEQ ID NOS:29, 37, 45, and 89. In some embodiments, the antibody heavy chain comprises the amino acid sequence of any one of SEQ ID NOS:258, 266, 274, and 282.

[0301] In some embodiments, the antibody heavy chain comprises: (a) an anti-HER2 (e.g., human HER2) antibody heavy chain variable region, or a fragment thereof, and (b) a modified Fc polypeptide that contains modifications that create a TfR-binding site, a knob mutation T366W, and amino acid modification N434S with or without M428L, according to EU numbering. In some embodiments, the antibody heavy chain comprises the amino acid sequence of any one of SEQ ID NOS:3, 11, 19, and 83. In some embodiments, the antibody heavy chain comprises the amino acid sequence of any one of SEQ ID NOS:31, 39, 47, and 91. In some embodiments, the antibody heavy chain comprises the amino acid sequence of any one of SEQ ID NOS:260, 268, 276, and 284.

[0302] In some embodiments, the antibody heavy chain comprises: (a) an anti-HER2 (e.g., human HER2) antibody heavy chain variable region, or a fragment thereof, and (b) a modified Fc polypeptide that contains modifications that create a TfR-binding site and hole mutations T366S, L368A, and Y407V, according to EU numbering. In some embodiments, the antibody heavy chain comprises the amino acid sequence of any one of SEQ ID NOS: NOS:5, 13, 21, and 85. In some embodiments, the antibody heavy chain comprises the amino acid sequence of any one of SEQ ID NOS: 33, 41, 49, and 93. In some embodiments, the antibody heavy chain comprises the amino acid sequence of any one of SEQ ID NOS: NOS:262, 270, 278, and 286.

[0303] In some embodiments, the antibody heavy chain comprises: (a) an anti-HER2 (e.g., human HER2) antibody heavy chain variable region, or a fragment thereof, and (b) a modified Fc polypeptide that contains modifications that create a TfR-binding site, hole mutations T366S, L368A, and Y407V, and amino acid modification N434S with or without M428L, according to EU numbering. In some embodiments, the antibody heavy chain comprises the amino acid sequence of any one of SEQ ID NOS:7, 15, 23, and 87. In some embodiments, the antibody heavy chain comprises the amino acid sequence of any one of SEQ ID NOS:35, 43, 51, and 95. In some embodiments, the antibody heavy chain comprises the amino acid sequence of any one of SEQ ID NOS:264, 272, 280, and 288.

### IV. TfR-Binding Fc Polypeptides

[0304] This section describes modified Fc polypeptides that bind to TfR and are capable of being transported across the blood-brain barrier (BBB).

[0305] CH3 TfR-Binding Polypeptides

[0306] In some embodiments, the modified Fc polypeptide contains a modified human Ig CH3 domain, such as an IgG CH3 domain. The CH3 domain can be of any IgG subtype, i.e., from IgG1, IgG2, IgG3, or IgG4. In the context of IgG antibodies, a CH3 domain refers to the segment of amino acids from about position 341 to about position 447 as numbered according to the EU numbering scheme. The positions in the CH3 domain for purposes of identifying the corresponding set of amino acid positions for TfR binding are determined with reference to EU numbering scheme, SEQ ID NO:101, or amino acids 111-217 of SEQ ID NO:99 unless otherwise specified. Substitutions are also determined with reference to EU numbering scheme or SEQ ID NO:99, i.e., an amino acid is considered to be a substitution relative to the amino acid at the corresponding position in EU numbering scheme or SEQ ID NO:99.

[0307] As indicated above, sets of residues of a CH3 domain that can be modified are numbered herein with reference to EU numbering scheme or SEQ ID NO:99. Any CH3 domain, e.g., an IgG1, IgG2, IgG3, or IgG4 CH3 domain, may have modifications, e.g., amino acid substitutions, in one or more sets of residues that correspond to residues at the noted positions in EU numbering scheme or SEQ ID NO:99. The positions of each of the IgG1, IgG2, IgG3, and IgG4 sequences that correspond to any given position of EU numbering scheme or SEQ ID NO:99 can be readily determined.

[0308] One of skill understands that CH3 domains of other immunoglobulin isotypes, e.g., IgM, IgA, IgE, IgD, etc. may be similarly modified by identifying the amino acids in those domains that correspond to the amino acid positions described herein. Modifications may also be made to corresponding domains from immunoglobulins from other species, e.g., non-human primates, monkey, mouse, rat, rabbit, dog, pig, chicken, and the like.

[0309] In one embodiment, a modified CH3 domain polypeptide that specifically binds TfR binds to the apical domain of the TfR at an epitope that comprises position 208 of the full length human TfR sequence (SEQ ID NO:102), which corresponds to position 11 of the human TfR apical domain sequence set forth in SEQ ID NO:103. SEQ ID NO:103 corresponds to amino acids 198-378 of the human TfR-1 uniprotein sequence P02786 (SEQ ID NO:102). In some embodiments, the modified CH3 domain polypeptide binds to the apical domain of the TfR at an epitope that comprises positions 158, 188, 199, 207, 208, 209, 210, 211, 212, 213, 214, 215, and/or 294 of the full length human TfR sequence (SEQ ID NO:102). The modified CH3 domain polypeptide may bind to the TfR without blocking or otherwise inhibiting binding of transferrin to the receptor. In some embodiments, binding of transferrin to TfR is not substantially inhibited. In some embodiments, binding of transferrin to TfR is inhibited by less than about 50% (e.g., less than about 45%, 40%, 35%, 30%, 25%, 20%, 15%, 10%, or 5%). In some embodiments, binding of transferrin to TfR is inhibited by less than about 20% (e.g., less than about 19%, 18%, 17%, 16%, 15%, 14%, 13%, 12%, 11%, 10%, 9%, 8%, 7%, 6%, 5%, 4%, 3%, 2%, or 1%). Illustrative CH3 domain polypeptides that exhibit this binding specificity include polypeptides having amino acid substitutions at positions 380, 384, 386, 387, 388, 389, 390, 413, 415, 416, and 421, according to the EU numbering scheme.

[0310] CH3 TfR Binding Set: 380, 384, 386, 387, 388, 389, 390, 413, 415, 416, and 421

[0311] In some embodiments, a modified CH3 domain polypeptide comprises one, two, three, four, five, six, seven, eight, nine, ten, or eleven substitutions in a set of amino acid positions comprising 380, 384, 386, 387, 388, 389, 390, 413, 415, 416, and 421, according to the EU numbering scheme (set CH3C). Illustrative substitutions that may be introduced at these positions are shown in Table 5. Additional substitutions are shown in Table 6. In some embodiments, the amino acid at position 388 and/or 421 is an aromatic amino acid, e.g., Trp, Phe, or Tyr. In some embodiments, the amino acid at position 388 is Trp. In some embodiments, the amino acid at position 388 is Gly. In some embodiments, the aromatic amino acid at position 421 is Trp or Phe.

[0312] In certain embodiments, the modified CH3 domain polypeptide comprises one, two, three, four, five, six, seven, eight, nine, ten, or eleven positions selected from the following: Glu, Leu, Ser, Val, Trp, Tyr, or Gln at position 380; Leu, Tyr, Phe, Trp, Met, Pro, or Val at position 384; Leu, Thr, His, Pro, Asn, Val, or Phe at position 386; Val, Pro, Ile, or an acidic amino acid at position 387; Trp at position 388; an aliphatic amino acid, Gly, Ser, Thr, or Asn at position 389; Gly, His, Gln, Leu, Lys, Val, Phe, Ser, Ala, Asp, Glu, Asn, Arg, or Thr at position 390; an acidic amino acid, Ala, Ser, Leu, Thr, Pro, Ile, or His at position 413; Glu, Ser, Asp, Gly, Thr, Pro, Gln, or Arg at position 415; Thr, Arg, Asn, or an acidic amino acid at position 416; and/or an aromatic amino acid, His, or Lys at position 421

[0313] In some embodiments, a modified CH3 domain polypeptide that specifically binds TfR has at least 70% identity, at least 75% identity, at least 80% identity, at least 85% identity, at least 90% identity, or at least 95% identity to amino acids 111-217 of any one of SEQ ID NOS:177-180. In some embodiments, such a modified CH3 domain polypeptide comprises amino acids 154-160 and/or 183-191 of any one of SEQ ID NOS:177-180. In some embodiments, such a modified CH3 domain polypeptide comprises amino acids 150-160 and/or 183-191 of any one of SEQ ID NOS:177-180. In some embodiments, a modified CH3 domain polypeptide comprises amino acids 150-160 and/or 183-196 of any one of SEQ ID NOS:177-180.

[0314] In some embodiments, a modified CH3 domain polypeptide has at least 70% identity, at least 75% identity, at least 80% identity, at least 85% identity, at least 90% identity, or at least 95% identity to amino acids 111-217 of SEQ ID NO:99, with the proviso that the percent identity does not include the set of positions 154, 156, 157, 158, 159, 160, 183, 186, and 191 of SEQ ID NO:99 (positions 384, 386, 387, 388, 389, 390, 413, 416, and 421, according to EU numbering scheme). In some embodiments, the modified CH3 domain polypeptide comprises amino acids 154-160 and/or amino acids 183-191 as set forth in any one of SEQ ID NOS:177-180.

[0315] In some embodiments, a modified CH3 domain polypeptide has at least 70% identity, at least 75% identity, at least 80% identity, at least 85% identity, at least 90% identity, or at least 95% identity to any one of SEQ ID NOS:177-180, with the proviso that at least five, six, seven, eight, nine, ten, eleven, twelve, thirteen, fourteen, fifteen or sixteen of the positions that correspond to positions 150, 154, 156, 157, 158, 159, 160, 161, 162, 183, 184, 185, 186, 191, 194, and 196 of any one of SEQ ID NOS:177-180 (positions 380, 384, 386, 384, 388, 389, 390, 391, 392, 413, 414, 415, 416, 421, 424, and 426, according to EU numbering scheme) are not deleted or substituted.

[0316] In some embodiments, the modified CH3 domain polypeptide has at least 75% identity, at least 80% identity, at least 85% identity, at least 90% identity, or at least 95% identity to any one of SEQ ID NOS:177-180 and also comprises at at least five, six, seven, eight, nine, ten, eleven, twelve, thirteen, fourteen, fifteen or sixteen of the positions as follows: Trp, Tyr, Leu, Gln, or Glu at position 380; Leu, Tyr, Met, or Val at position 384; Leu, Thr, His, or Pro at position 386; Val, Pro, or an acidic amino acid at position 387; an aromatic amino acid, e.g., Trp, at position 388; Val, Ser, or Ala at position 389; Ser or Asn at position 390; Ser, Thr, Gln, or Phe at position 391; Gln, Phe, or His at position 392; an acidic amino acid, Ala, Ser, Leu, Thr, or Pro at position 413; Lys, Arg, Gly or Pro at position 414; Glu or Ser at position 415; Thr or an acidic amino acid at position 416; Trp, Tyr, His or Phe at position 421; Ser, Thr, Glu or Lys at position 424; and Ser, Trp, or Gly at position 426.

[0317] In additional embodiments, a TfR-binding polypeptide comprises amino acids 157-194, amino acids 153-194, or amino acids 153-199, of any one of SEQ ID NOS:177-180. In further embodiments, the polypeptide comprises an amino acid sequence having at least 75% identity, at least 80% identity, at least 85% identity, at least 90% identity, or at least 95% identity to amino acids 157-194 of any one of SEQ ID NOS:177-180, or to amino acids 153-194, or to amino acids 153-199, of any one of SEQ ID NOS:177-180.

[0318] In some embodiments, the polypeptide comprises any one of SEQ ID NOS:177-180. In further embodiments, the polypeptide may have at least 75% identity, at least 80% identity, at least 85% identity, at least 90% identity, or at least 95% identity to any one of SEQ ID NOS:177-180.

[0319] FcRn Binding Sites

[0320] A polypeptide described herein that can be transported across the BBB additionally may comprise an FcRn binding site. In some embodiments, the FcRn binding site is within the modified Fc polypeptide or a fragment thereof.

[0321] In some embodiments, the FcRn binding site comprises a native FcRn binding site. In some embodiments, the FcRn binding site does not comprise amino acid changes relative to the amino acid sequence of a native FcRn binding site. In some embodiments, the native FcRn binding site is an IgG binding site, e.g., a human IgG binding site. In some embodiments, the FcRn binding site comprises a modification that alters FcRn binding.

[0322] In some embodiments, an FcRn binding site has one or more amino acid residues that are mutated, e.g., substituted, wherein the mutation(s) increase serum half-life or do not substantially reduce serum half-life (i.e., reduce serum half-life by no more than 25% compared to a counterpart protein having the wild-type residues at the mutated positions when assayed under the same conditions). In some embodiments, an FcRn binding site has one or more amino acid residues that are substituted at positions 21 to 26, 198, and 203 to 206, wherein the positions are determined with reference to SEQ ID NO:99.

[0323] In some embodiments, the FcRn binding site comprises one or more mutations, relative to a native human IgG sequence, that extend serum half-life of the modified polypeptide. In some embodiments, a mutation, e.g., a substitution, is introduced at one or more of positions 14-27, 49-54, 77-87, 153-160, and 198-205 as determined with reference to SEQ ID NO:99 (which positions correspond to positions 244-257, 279-284, 307-317, 383-390, and 428-435 using EU numbering). In some embodiments, one or more mutations are introduced at positions 21, 22, 24, 25, 26, 77, 78, 79, 81, 82, 84, 155, 156, 157, 159, 198, 203, 204, or 206 as determined with reference to SEQ ID NO:99 (which positions correspond to positions 251, 252, 254, 255, 256, 307, 308, 309, 311, 312, 314, 385, 386, 387, 389, 428, 433, 434, or 436 using EU numbering). In some embodiments, mutations are introduced into one, two, or three of positions 22, 24, and 25 as determined with reference to SEQ ID NO:99 (which correspond to positions 252, 254, and 256 using EU numbering). In some embodiments, the mutations are M22Y, S24T, and T26E as numbered with reference to SEQ ID NO:99. In some embodiments, a modified Fc polypeptide described herein further comprises mutations M22Y, S24T, and T26E. In some embodiments, mutations are introduced into one or two of positions 198 and 204 as determined with reference to SEQ ID NO:99 (which correspond to positions 428 and 434 using EU numbering). In some embodiments, the mutations are M198L and N204S as numbered with reference to SEQ ID NO:99. In some embodiments, a modified Fc polypeptide described herein further comprises mutation N204S with or without M198L. In some embodiments, a modified Fc polypeptide comprises a substitution at one, two or all three of positions T307, E380, and N434 according to EU numbering (which correspond to T77, E150, and N204 as numbered with reference to SEQ ID NO:99). In some embodiments, the mutations are T307Q and N434A (SEQ ID NO:99, T77Q and N204A). In some embodiments, a modified Fc polypeptide comprises mutations T307A, E380A, and N434A (SEQ ID NO:99, T77A, E150A, and N204A). In some embodiments, a modified Fc polypeptide comprises substitutions at positions T250 and M428 (which correspond to T20 and M198 as numbered with reference to SEQ ID NO:99). In some embodiments, the Fc polypeptide comprises mutations T250Q and/or M428L (SEQ ID NO:99, T20Q and M198L). In some embodiments, a modified Fc polypeptide comprises substitutions at positions M428 and N434 (which correspond to M198 and N204 as numbered with reference to SEQ ID NO:99). In some embodiments, a modified Fc polypeptide comprises substitutions M428L and N434S (which correspond to M198L and N204S as numbered with reference to SEQ ID NO:99). In some embodiments, a modified Fc polypeptide comprises an N434S or N434A substitution (which corresponds to N204S or N204A as numbered with reference to SEQ ID NO:99).

### V. Mutations that Reduce Effector Function or FcγR Binding

[0324] An Fc polypeptide as provided herein (e.g., that is modified to bind TfR and initiate transport across the BBB) may also comprise additional mutations to reduce effector function. As described herein, by introducing both the TfR-binding site and mutations that reduce TfR-mediated FcγR binding to the same Fc polypeptide of the Fc polypeptide dimer, it was possible to reduce effector function upon TfR binding, leading to TfR binding without substantial depletion of reticulocytes, but still maintain and exhibit a level of effector function (e.g., ADCC or CDC) when the Fc polypeptide dimer is fused to a therapeutic Fab and bound to the Fab's target antigen.

[0325] In some embodiments, an Fc polypeptide comprising a modified CH3 domain has an effector function, i.e., the ability to induce certain biological functions upon binding to an Fc receptor expressed on an effector cell that mediates the effector function. Effector cells include, but are not limited to, monocytes, macrophages, neutrophils, dendritic cells, eosinophils, mast cells, platelets, B cells, large granular lymphocytes, Langerhans' cells, natural killer (NK) cells, and cytotoxic T cells.

[0326] Examples of effector functions include, but are not limited to, C1q binding and CDC, Fc receptor binding, ADCC, antibody-dependent cell-mediated phagocytosis (ADCP), down-regulation of cell surface receptors (e.g., B cell receptor), and B-cell activation. Effector functions may vary with the antibody class. For example, native human IgG1 and IgG3 antibodies can elicit ADCC and CDC activities upon binding to an appropriate Fc receptor present on an immune system cell; and native human IgG1, IgG2, IgG3, and IgG4 can elicit ADCP functions upon binding to the appropriate Fc receptor present on an immune cell.

[0327] In some embodiments, an Fc polypeptide having an TfR-binding site as described herein may include additional modifications that reduce effector function, i.e., reduce effector function upon TfR binding. Having reduced effector function upon TfR binding of the Fc polypeptide dimer is desirable because it leads to reduced reticulocyte depletion since reticulocytes also have TfR on the cell surface. As described in detail herein, Fc polypeptide dimers having the cis configuration, i.e., Fc polypeptide dimers having both the TfR-binding site and mutations that reduce effector function on the same Fc polypeptide of the Fc polypeptide dimer, exhibit TfR binding without substantial depletion of reticulocytes, but still maintain a level of effector function (e.g., ADCC) when the Fc polypeptide dimer is fused to a therapeutic Fab and bound to the Fab's target antigen. Having effector function when the Fc polypeptide dimer is fused to a therapeutic Fab that is bound to the Fab's target antigen is desirable in, e.g., cancer therapeutics (e.g., brain cancer therapeutics).

[0328] Illustrative Fc polypeptide mutations that modulate an effector function include, but are not limited to, substitutions in a CH2 domain, e.g., at positions corresponding to positions 4 and 5 of SEQ ID NO:99 (positions 234 and 235 according to EU numbering scheme). In some embodiments, the substitutions in a modified CH2 domain comprise Ala at positions 4 and 5 of SEQ ID NO:99. In some embodiments, the substitutions in a modified CH2 domain comprise Ala at positions 4 and 5 and Gly at position 99 of SEQ ID NO:99.

[0329] Additional Fc polypeptide mutations that modulate an effector function include, but are not limited to, one or more substitutions at positions 238, 265, 269, 270, 297, 327 and 329 (EU numbering scheme, which correspond to positions 8, 35, 39, 40, 67, 97, and 99 as numbered with reference to SEQ ID NO:99). Illustrative substitutions (as numbered with EU numbering scheme), include the following: position 329 may have a mutation in which proline is substituted with a glycine or arginine or an amino acid residue large enough to destroy the Fc/Fcγ receptor interface that is formed between proline 329 of the Fc and tryptophan residues Trp 87 and Trp 110 of FcγRIII. Additional illustrative substitutions include S228P, E233P, L235E, N297A, N297D, and P331S. Multiple substitutions may also be present, e.g., L234A and L235A of a human IgG1 Fc region; L234A, L235A, and P329G of a human IgG1 Fc region; S228P and L235E of a human IgG4 Fc region; L234A and G237A of a human IgG1 Fc region; L234A, L235A, and G237A of a human IgG1 Fc region; V234A and G237A of a human IgG2 Fc region; L235A, G237A, and E318A of a human IgG4 Fc region; and S228P and L236E of a human IgG4 Fc region. In some embodiments, an Fc polypeptide may have one or more amino acid substitutions that modulate ADCC, e.g., substitutions at positions 298, 333, and/or 334 of the Fc region, according to the EU numbering scheme.

[0330] In some embodiments, a polypeptide as described herein may have one or more amino acid substitutions that increase or decrease ADCC or may have mutations that alter C1q binding and/or CDC.

[0331] In particular embodiments, an Fc polypeptide having a TfR-binding site may be modified to reduce effector function, i.e., reduce FcγR binding. In some embodiments, an Fc polypeptide having a TfR-binding site may include mutations L234A and L235A (EU numbering scheme, which correspond to positions 4 and 5 as numbered with reference to SEQ ID NO:99). In other embodiments, an Fc polypeptide having a TfR-binding site may include mutations L234A, L235A, and P329G (EU numbering scheme, which correspond to positions 4, 5, and 99 as numbered with reference to SEQ ID NO:99).

### VI. Measuring Effector Function or FcγR Binding

[0332] Methods for analyzing binding affinity, binding kinetics, and cross-reactivity between an Fc polypeptide or an Fc polypeptide dimer and FcγR are known in the art. These methods include, but are not limited to, solid-phase binding assays (e.g., ELISA assay), immunoprecipitation, surface plasmon resonance (e.g., Biacore™ (GE Healthcare, Piscataway, N.J.)), kinetic exclusion assays (e.g., KinExA®), flow cytometry, fluorescence-activated cell sorting (FACS), BioLayer interferometry (e.g., Octet® (ForteBio, Inc., Menlo Park, Calif.)), and Western blot analysis. In some embodiments, ELISA is used to determine binding affinity and/or cross-reactivity. Methods for performing ELISA assays are known in the art. In some embodiments, surface plasmon resonance (SPR) is used to determine binding affinity, binding kinetics, and/or cross-reactivity. In some embodiments, kinetic exclusion assays are used to determine binding affinity, binding kinetics, and/or cross-reactivity. In some embodiments, BioLayer interferometry assays are used to determine binding affinity, binding kinetics, and/or cross-reactivity.

[0333] ADCC is a type of immune response in which antibodies bind to antigens on the surface of pathogenic or tumorigenic target cells and identifies them for destruction by effector cells, e.g., peripheral blood mononuclear cells (e.g., natural killer (NK) cells, T cells, and B cells). Effector cells bearing FcγR recognize and bind the Fc region of the antibodies bound to the target cell. The antibodies thus confer specificity to the target cell killing. CDC is initiated when C1q, the initiating component of the classical complement pathway, is bound to the Fc region of target-bound antibodies. ADCC and CDC activities may be determined in a standard in vivo or in vitro assay of cell killing. Methods for determining ADCC and CDC activities are available in the art. In some embodiments, the methods may involve labeling target cells with a radioactive material, such as ⁵¹Cr, or a fluorescent dye, such as Calcein-AM. The labeled cells may be incubated with the antibody and effector cells and killing of the target cells by ADCC or CDC may be detected by the release of radioactivity or fluorescence.

[0334] Other assays to measure ADCC and CDC activities include, e.g., a lactate dehydrogenase (LDH) release assay. When the cell membranes are compromised or damaged in any way, LDH, a soluble yet stable enzyme in the cytoplasm, is released into the surrounding extracellular space. The presence of this enzyme in the culture medium can be used as a cell death marker. The relative amounts of live and dead cells within the medium can then be quantitated by measuring the amount of released LDH using a colorimetric or fluorometric LDH cytotoxicity assay.

### VII. Additional Mutations in an Fc Region that Comprises A Modified CH3 Domain Polypeptide

[0335] An Fc polypeptide as provided herein (e.g., that is modified to bind TfR and initiate transport across the BBB) may also comprise additional mutations, e.g., to increase serum stability or serum half-life, to modulate effector function, to influence glyscosylation, to reduce immunogenicity in humans, and/or to provide for knob and hole heterodimerization of Fc polypeptides.

[0336] In some embodiments, a modified Fc polypeptide described herein has an amino acid sequence identity of at least about 75%, 76%, 77%, 78%, 79%, 80%, 81%, 82%, 83%, 84%, 85%, 86%, 87%, 88%, 89%, 90%, 91%, 92%, 93%, 94%, 95%, 96%, 97%, 98%, or 99% to a corresponding wild-type Fc polypeptide (e.g., a human IgG1, IgG2, IgG3, or IgG4 Fc polypeptide).

[0337] A modified Fc polypeptide described herein may also have other mutations introduced outside of the specified sets of amino acids, e.g., to influence glyscosylation, to increase serum half-life or, for CH3 domains, to provide for knob and hole heterodimerization of polypeptides that comprise the modified CH3 domain. Generally, the method involves introducing a protuberance (“knob”) at the interface of a first polypeptide and a corresponding cavity (“hole”) in the interface of a second polypeptide, such that the protuberance can be positioned in the cavity so as to promote heterodimer formation and hinder homodimer formation. Protuberances are constructed by replacing small amino acid side chains from the interface of the first polypeptide with larger side chains (e.g., tyrosine or tryptophan). Compensatory cavities of identical or similar size to the protuberances are created in the interface of the second polypeptide by replacing large amino acid side chains with smaller ones (e.g., alanine or threonine). Such additional mutations are at a position in the polypeptide that does not have a negative effect on binding of the modified CH3 domain to the TfR.

[0338] In one illustrative embodiment of a knob and hole approach for dimerization, a position corresponding to position 136 of SEQ ID NO:99 of a first Fc polypeptide subunit to be dimerized has a tryptophan in place of a native threonine and a second Fc polypeptide subunit of the dimer has a valine at a position corresponding to position 177 of SEQ ID NO:99 in place of the native tyrosine. The second subunit of the Fc polypeptide may further comprise a substitution in which the native threonine at the position corresponding to position 136 of SEQ ID NO:99 is substituted with a serine and a native leucine at the position corresponding to position 138 of SEQ ID NO:99 is substituted with an alanine.

[0339] A modified Fc polypeptide as described herein may also be engineered to contain other modifications for heterodimerization, e.g., electrostatic engineering of contact residues within a CH3-CH3 interface that are naturally charged or hydrophobic patch modifications.

[0340] In some embodiments, modifications to enhance serum half-life may be introduced. For example, in some embodiments, a modified Fc polypeptide as described herein comprises a CH2 domain comprising a Tyr at a position corresponding to position 22 of SEQ ID NO:99, Thr at a position corresponding to 24 of SEQ ID NO:99, and Glu at a position corresponding to position 26 of SEQ ID NO:99. Alternatively, a modified Fc polypeptide as described herein may comprise M198L and N204S substitutions as numbered with reference to SEQ ID NO:99. Alternatively, a modified Fc polypeptide as described herein may comprise an N204S or N204A substitution as numbered with reference to SEQ ID NO:99.

[0341] Illustrative Fc Polypeptides Comprising Additional Mutations

[0342] A modified Fc polypeptide as described herein (e.g., any one of clones CH3C.35.23.3, CH3C.35.23.4, CH3C.35.23, and CH3C.35.23.1.1) may comprise additional mutations including a knob mutation (e.g., T136W as numbered with reference to SEQ ID NO:99), hole mutations (e.g., T136S, L138A, and Y177V as numbered with reference to SEQ ID NO:99), mutations that modulate effector function (e.g., L4A, L5A, and/or P99G (e.g., L4A and L5A) as numbered with reference to SEQ ID NO:99), and/or mutations that increase serum stability or serum half-life (e.g., (i) M22Y, S24T, and T26E as numbered with reference to SEQ ID NO:99, or (ii) N204S with or without M198L as numbered with reference to SEQ ID NO:99).

[0343] In some embodiments, a modified Fc polypeptide as described herein (e.g., any one of clones CH3C.35.23.3, CH3C.35.23.4, CH3C.35.23, and CH3C.35.23.1.1) may have a knob mutation (e.g., T136W as numbered with reference to SEQ ID NO:99) and at least 85% identity, at least 90% identity, or at least 95% identity to the sequence of any one of SEQ ID NOS:177-180. In some embodiments, a modified Fc polypeptide having the sequence of any one of SEQ ID NOS:177-180 may be modified to have a knob mutation.

[0344] In some embodiments, a modified Fc polypeptide as described herein (e.g., any one of clones CH3C.35.23.3, CH3C.35.23.4, CH3C.35.23, and CH3C.35.23.1.1) may have a knob mutation (e.g., T136W as numbered with reference to SEQ ID NO:99), mutations that modulate effector function (e.g., L4A, L5A, and/or P99G (e.g., L4A and L5A) as numbered with reference to SEQ ID NO:99), and at least 85% identity, at least 90% identity, or at least 95% identity to the sequence of any one of SEQ ID NOS:177-180. In some embodiments, a modified Fc polypeptide having the sequence of any one of SEQ ID NOS:177-180 may be modified to have a knob mutation and mutations that modulate effector function.

[0345] In some embodiments, a modified Fc polypeptide as described herein (e.g., any one of clones CH3C.35.23.3, CH3C.35.23.4, CH3C.35.23, and CH3C.35.23.1.1) may have a knob mutation (e.g., T136W as numbered with reference to SEQ ID NO:99), mutations that increase serum stability or serum half-life (e.g., (i) M22Y, S24T, and T26E as numbered with reference to SEQ ID NO:99, or (ii) N204S with or without M198L as numbered with reference to SEQ ID NO:99), and at least 85% identity, at least 90% identity, or at least 95% identity to the sequence of any one of SEQ ID NOS:177-180. In some embodiments, a modified Fc polypeptide having the sequence of any one of SEQ ID NOS:177-180 may be modified to have a knob mutation and mutations that increase serum stability or serum half-life.

[0346] In some embodiments, a modified Fc polypeptide as described herein (e.g., any one of clones CH3C.35.23.3, CH3C.35.23.4, CH3C.35.23, and CH3C.35.23.1.1) may have a knob mutation (e.g., T136W as numbered with reference to SEQ ID NO:99), mutations that modulate effector function (e.g., L4A, L5A, and/or P99G (e.g., L4A and L5A) as numbered with reference to SEQ ID NO:99), mutations that increase serum stability or serum half-life (e.g., (i) M22Y, S24T, and T26E as numbered with reference to SEQ ID NO:99, or (ii) N204S with or without M198L as numbered with reference to SEQ ID NO:99), and at least 85% identity, at least 90% identity, or at least 95% identity to the sequence of any one of SEQ ID NOS:177-180. In some embodiments, a modified Fc polypeptide having the sequence of any one of SEQ ID NOS:177-180 may be modified to have a knob mutation, mutations that modulate effector function, and mutations that increase serum stability or serum half-life.

[0347] In some embodiments, a modified Fc polypeptide as described herein (e.g., any one of clones CH3C.35.23.3, CH3C.35.23.4, CH3C.35.23, and CH3C.35.23.1.1) may have hole mutations (e.g., T136S, L138A, and Y177V as numbered with reference to SEQ ID NO:99) and at least 85% identity, at least 90% identity, or at least 95% identity to the sequence of any one of SEQ ID NOS:177-180. In some embodiments, a modified Fc polypeptide having the sequence of any one of SEQ ID NOS:177-180 may be modified to have hole mutations.

[0348] In some embodiments, a modified Fc polypeptide as described herein (e.g., any one of clones CH3C.35.23.3, CH3C.35.23.4, CH3C.35.23, and CH3C.35.23.1.1) may have hole mutations (e.g., T136S, L138A, and Y177V as numbered with reference to SEQ ID NO:99), mutations that modulate effector function (e.g., L4A, L5A, and/or P99G (e.g., L4A and L5A) as numbered with reference to SEQ ID NO:99), and at least 85% identity, at least 90% identity, or at least 95% identity to the sequence of any one of SEQ ID NOS:177-180. In some embodiments, a modified Fc polypeptide having the sequence of any one of SEQ ID NOS:177-180 may be modified to have hole mutations and mutations that modulate effector function.

[0349] In some embodiments, a modified Fc polypeptide as described herein (e.g., any one of clones CH3C.35.23.3, CH3C.35.23.4, CH3C.35.23, and CH3C.35.23.1.1) may have hole mutations (e.g., T136S, L138A, and Y177V as numbered with reference to SEQ ID NO:99), mutations that increase serum stability or serum half-life (e.g., (i) M22Y, S24T, and T26E as numbered with reference to SEQ ID NO:99, or (ii) N204S with or without M198L as numbered with reference to SEQ ID NO:99), and at least 85% identity, at least 90% identity, or at least 95% identity to the sequence of any one of SEQ ID NOS:177-180. In some embodiments, a modified Fc polypeptide having the sequence of any one of SEQ ID NOS:177-180 may be modified to have hole mutations and mutations that increase serum stability or serum half-life.

[0350] In some embodiments, a modified Fc polypeptide as described herein (e.g., any one of clones CH3C.35.23.3, CH3C.35.23.4, CH3C.35.23, and CH3C.35.23.1.1) may have hole mutations (e.g., T136S, L138A, and Y177V as numbered with reference to SEQ ID NO:99), mutations that modulate effector function (e.g., L4A, L5A, and/or P99G (e.g., L4A and L5A) as numbered with reference to SEQ ID NO:99), mutations that increase serum stability or serum half-life (e.g., (i) M22Y, S24T, and T26E as numbered with reference to SEQ ID NO:99, or (ii) N204S with or without M198L as numbered with reference to SEQ ID NO:99), and at least 85% identity, at least 90% identity, or at least 95% identity to the sequence of any one of SEQ ID NOS:177-180. In some embodiments, a modified Fc polypeptide having the sequence of any one of SEQ ID NOS: 177-180 may be modified to have hole mutations, mutations that modulate effector function, and mutations that increase serum stability or serum half-life.

[0351] Clone CH3C.35.23.3

[0352] In some embodiments, clone CH3C.35.23.3 may have a knob mutation (e.g., T136W as numbered with reference to SEQ ID NO:99) and at least 85% identity, at least 90% identity, or at least 95% identity to the sequence of SEQ ID NO:105. In some embodiments, clone CH3C.35.23.3 with the knob mutation has the sequence of SEQ ID NO:105.

[0353] In some embodiments, clone CH3C.35.23.3 may have a knob mutation (e.g., T136W as numbered with reference to SEQ ID NO:99), mutations that modulate effector function (e.g., L4A, L5A, and/or P99G (e.g., L4A and L5A) as numbered with reference to SEQ ID NO:99), and at least 85% identity, at least 90% identity, or at least 95% identity to the sequence of SEQ ID NO:106 or 107. In some embodiments, clone CH3C.35.23.3 with the knob mutation and the mutations that modulate effector function has the sequence of SEQ ID NO:106 or 107.

[0354] In some embodiments, clone CH3C.35.23.3 may have a knob mutation (e.g., T136W as numbered with reference to SEQ ID NO:99), mutations that increase serum stability or serum half-life (e.g., M22Y, S24T, and T26E as numbered with reference to SEQ ID NO:99), and at least 85% identity, at least 90% identity, or at least 95% identity to the sequence of SEQ ID NO:108. In some embodiments, clone CH3C.35.23.3 with the knob mutation and the mutations that increase serum stability or serum half-life has the sequence of SEQ ID NO:108.

[0355] In some embodiments, clone CH3C.35.23.3 may have a knob mutation (e.g., T136W as numbered with reference to SEQ ID NO:99), mutations that increase serum stability or serum half-life (e.g., N204S with or without M198L as numbered with reference to SEQ ID NO:99), and at least 85% identity, at least 90% identity, or at least 95% identity to the sequence of SEQ ID NO:109. In some embodiments, clone CH3C.35.23.3 with the knob mutation and the mutations that increase serum stability or serum half-life has the sequence of SEQ ID NO:109.

[0356] In some embodiments, clone CH3C.35.23.3 may have a knob mutation (e.g., T136W as numbered with reference to SEQ ID NO:99), mutations that modulate effector function (e.g., L4A, L5A, and/or P99G (e.g., L4A and L5A) as numbered with reference to SEQ ID NO:99), mutations that increase serum stability or serum half-life (e.g., M22Y, S24T, and T26E as numbered with reference to SEQ ID NO:99), and at least 85% identity, at least 90% identity, or at least 95% identity to the sequence of SEQ ID NO:110 or 111. In some embodiments, clone CH3C.35.23.3 with the knob mutation, the mutations that modulate effector function, and the mutations that increase serum stability or serum half-life has the sequence of SEQ ID NO:110 or 111.

[0357] In some embodiments, clone CH3C.35.23.3 may have a knob mutation (e.g., T136W as numbered with reference to SEQ ID NO:99), mutations that modulate effector function (e.g., L4A, L5A, and/or P99G (e.g., L4A and L5A) as numbered with reference to SEQ ID NO:99), mutations that increase serum stability or serum half-life (e.g., N204S with or without M198L as numbered with reference to SEQ ID NO:99), and at least 85% identity, at least 90% identity, or at least 95% identity to the sequence of SEQ ID NO:112 or 113. In some embodiments, clone CH3C.35.23.3 with the knob mutation, the mutations that modulate effector function, and the mutations that increase serum stability or serum half-life has the sequence of SEQ ID NO:112 or 113.

[0358] In some embodiments, clone CH3C.35.23.3 may have hole mutations (e.g., T136S, L138A, and Y177V as numbered with reference to SEQ ID NO:99) and at least 85% identity, at least 90% identity, or at least 95% identity to the sequence of SEQ ID NO:114. In some embodiments, clone CH3C.35.23.3 with the hole mutations and the sequence of SEQ ID NO:114.

[0359] In some embodiments, clone CH3C.35.23.3 may have hole mutations (e.g., T136S, L138A, and Y177V as numbered with reference to SEQ ID NO:99), mutations that modulate effector function (e.g., L4A, L5A, and/or P99G (e.g., L4A and L5A) as numbered with reference to SEQ ID NO:99), and at least 85% identity, at least 90% identity, or at least 95% identity to the sequence of SEQ ID NO:115 or 116. In some embodiments, clone CH3C.35.23.3 with the hole mutations and the mutations that modulate effector function has the sequence of SEQ ID NO:115 or 116.

[0360] In some embodiments, clone CH3C.35.23.3 may have hole mutations (e.g., T136S, L138A, and Y177V as numbered with reference to SEQ ID NO:99), mutations that increase serum stability or serum half-life (e.g., M22Y, S24T, and T26E as numbered with reference to SEQ ID NO:99), and at least 85% identity, at least 90% identity, or at least 95% identity to the sequence of SEQ ID NO:117. In some embodiments, clone CH3C.35.23.3 with the hole mutations and the mutations that increase serum stability or serum half-life has the sequence of SEQ ID NO:117.

[0361] In some embodiments, clone CH3C.35.23.3 may have hole mutations (e.g., T136S, L138A, and Y177V as numbered with reference to SEQ ID NO:99), mutations that increase serum stability or serum half-life (e.g., N204S with or without M198L as numbered with reference to SEQ ID NO:99), and at least 85% identity, at least 90% identity, or at least 95% identity to the sequence of SEQ ID NO:118. In some embodiments, clone CH3C.35.23.3 with the hole mutations and the mutations that increase serum stability or serum half-life has the sequence of SEQ ID NO:118.

[0362] In some embodiments, clone CH3C.35.23.3 may have hole mutations (e.g., T136S, L138A, and Y177V as numbered with reference to SEQ ID NO:99), mutations that modulate effector function (e.g., L4A, L5A, and/or P99G (e.g., L4A and L5A) as numbered with reference to SEQ ID NO:99), mutations that increase serum stability or serum half-life (e.g., M22Y, S24T, and T26E as numbered with reference to SEQ ID NO:99), and at least 85% identity, at least 90% identity, or at least 95% identity to the sequence of SEQ ID NO:119 or 120. In some embodiments, clone CH3C.35.23.3 with the hole mutations, the mutations that modulate effector function, and the mutations that increase serum stability or serum half-life has the sequence of SEQ ID NO:119 or 120.

[0363] In some embodiments, clone CH3C.35.23.3 may have hole mutations (e.g., T136S, L138A, and Y177V as numbered with reference to SEQ ID NO:99), mutations that modulate effector function (e.g., L4A, L5A, and/or P99G (e.g., L4A and L5A) as numbered with reference to SEQ ID NO:99), mutations that increase serum stability or serum half-life (e.g., N204S with or without M198L as numbered with reference to SEQ ID NO:99), and at least 85% identity, at least 90% identity, or at least 95% identity to the sequence of SEQ ID NO:121 or 122. In some embodiments, clone CH3C.35.23.3 with the hole mutations, the mutations that modulate effector function, and the mutations that increase serum stability or serum half-life has the sequence of SEQ ID NO:121 or 122.

[0364] Clone CH3C.35.23.4

[0365] In some embodiments, clone CH3C.35.23.4 may have a knob mutation (e.g., T136W as numbered with reference to SEQ ID NO:99) and at least 85% identity, at least 90% identity, or at least 95% identity to the sequence of SEQ ID NO:123. In some embodiments, clone CH3C.35.23.4 with the knob mutation has the sequence of SEQ ID NO:123.

[0366] In some embodiments, clone CH3C.35.23.4 may have a knob mutation (e.g., T136W as numbered with reference to SEQ ID NO:99), mutations that modulate effector function (e.g., L4A, L5A, and/or P99G (e.g., L4A and L5A) as numbered with reference to SEQ ID NO:99), and at least 85% identity, at least 90% identity, or at least 95% identity to the sequence of SEQ ID NO:124 or 125. In some embodiments, clone CH3C.35.23.4 with the knob mutation and the mutations that modulate effector function has the sequence of SEQ ID NO:124 or 125.

[0367] In some embodiments, clone CH3C.35.23.4 may have a knob mutation (e.g., T136W as numbered with reference to SEQ ID NO:99), mutations that increase serum stability or serum half-life (e.g., M22Y, S24T, and T26E as numbered with reference to SEQ ID NO:99), and at least 85% identity, at least 90% identity, or at least 95% identity to the sequence of SEQ ID NO:126. In some embodiments, clone CH3C.35.23.4 with the knob mutation and the mutations that increase serum stability or serum half-life has the sequence of SEQ ID NO:126.

[0368] In some embodiments, clone CH3C.35.23.4 may have a knob mutation (e.g., T136W as numbered with reference to SEQ ID NO:99), mutations that increase serum stability or serum half-life (e.g., N204S with or without M198L as numbered with reference to SEQ ID NO:99), and at least 85% identity, at least 90% identity, or at least 95% identity to the sequence of SEQ ID NO:127. In some embodiments, clone CH3C.35.23.4 with the knob mutation and the mutations that increase serum stability or serum half-life has the sequence of SEQ ID NO:127.

[0369] In some embodiments, clone CH3C.35.23.4 may have a knob mutation (e.g., T136W as numbered with reference to SEQ ID NO:99), mutations that modulate effector function (e.g., L4A, L5A, and/or P99G (e.g., L4A and L5A) as numbered with reference to SEQ ID NO:99), mutations that increase serum stability or serum half-life (e.g., M22Y, S24T, and T26E as numbered with reference to SEQ ID NO:99), and at least 85% identity, at least 90% identity, or at least 95% identity to the sequence of SEQ ID NO:128 or 129. In some embodiments, clone CH3C.35.23.4 with the knob mutation, the mutations that modulate effector function, and the mutations that increase serum stability or serum half-life has the sequence of SEQ ID NO:128 or 129.

[0370] In some embodiments, clone CH3C.35.23.4 may have a knob mutation (e.g., T136W as numbered with reference to SEQ ID NO:99), mutations that modulate effector function (e.g., L4A, L5A, and/or P99G (e.g., L4A and L5A) as numbered with reference to SEQ ID NO:99), mutations that increase serum stability or serum half-life (e.g., N204S with or without M198L as numbered with reference to SEQ ID NO:99), and at least 85% identity, at least 90% identity, or at least 95% identity to the sequence of SEQ ID NO:130 or 131. In some embodiments, clone CH3C.35.23.4 with the knob mutation, the mutations that modulate effector function, and the mutations that increase serum stability or serum half-life has the sequence of SEQ ID NO:130 or 131.

[0371] In some embodiments, clone CH3C.35.23.4 may have hole mutations (e.g., T136S, L138A, and Y177V as numbered with reference to SEQ ID NO:99) and at least 85% identity, at least 90% identity, or at least 95% identity to the sequence of SEQ ID NO:132. In some embodiments, clone CH3C.35.23.4 with the hole mutations has the sequence of SEQ ID NO:132.

[0372] In some embodiments, clone CH3C.35.23.4 may have hole mutations (e.g., T136S, L138A, and Y177V as numbered with reference to SEQ ID NO:99), mutations that modulate effector function (e.g., L4A, L5A, and/or P99G (e.g., L4A and L5A) as numbered with reference to SEQ ID NO:99), and at least 85% identity, at least 90% identity, or at least 95% identity to the sequence of SEQ ID NO:133 or 134. In some embodiments, clone CH3C.35.23.4 with the hole mutations and the mutations that modulate effector function has the sequence of SEQ ID NO:133 or 134.

[0373] In some embodiments, clone CH3C.35.23.4 may have hole mutations (e.g., T136S, L138A, and Y177V as numbered with reference to SEQ ID NO:99), mutations that increase serum stability or serum half-life (e.g., M22Y, S24T, and T26E as numbered with reference to SEQ ID NO:99), and at least 85% identity, at least 90% identity, or at least 95% identity to the sequence of SEQ ID NO:135. In some embodiments, clone CH3C.35.23.4 with the hole mutations and the mutations that increase serum stability or serum half-life has the sequence of SEQ ID NO:135.

[0374] In some embodiments, clone CH3C.35.23.4 may have hole mutations (e.g., T136S, L138A, and Y177V as numbered with reference to SEQ ID NO:99), mutations that increase serum stability or serum half-life (e.g., N204S with or without M198L as numbered with reference to SEQ ID NO:99), and at least 85% identity, at least 90% identity, or at least 95% identity to the sequence of SEQ ID NO:136. In some embodiments, clone CH3C.35.23.4 with the hole mutations and the mutations that increase serum stability or serum half-life has the sequence of SEQ ID NO:136.

[0375] In some embodiments, clone CH3C.35.23.4 may have hole mutations (e.g., T136S, L138A, and Y177V as numbered with reference to SEQ ID NO:99), mutations that modulate effector function (e.g., L4A, L5A, and/or P99G (e.g., L4A and L5A) as numbered with reference to SEQ ID NO:99), mutations that increase serum stability or serum half-life (e.g., M22Y, S24T, and T26E as numbered with reference to SEQ ID NO:99), and at least 85% identity, at least 90% identity, or at least 95% identity to the sequence of SEQ ID NO:137 or 138. In some embodiments, clone CH3C.35.23.4 with the hole mutations, the mutations that modulate effector function, and the mutations that increase serum stability or serum half-life has the sequence of SEQ ID NO:137 or 138.

[0376] In some embodiments, clone CH3C.35.23.4 may have hole mutations (e.g., T136S, L138A, and Y177V as numbered with reference to SEQ ID NO:99), mutations that modulate effector function (e.g., L4A, L5A, and/or P99G (e.g., L4A and L5A) as numbered with reference to SEQ ID NO:99), mutations that increase serum stability or serum half-life (e.g., N204S with or without M198L as numbered with reference to SEQ ID NO:99), and at least 85% identity, at least 90% identity, or at least 95% identity to the sequence of SEQ ID NO:139 or 140. In some embodiments, clone CH3C.35.23.4 with the hole mutations, the mutations that modulate effector function, and the mutations that increase serum stability or serum half-life has the sequence of SEQ ID NO:139 or 140.

[0377] Clone CH3C.35.23

[0378] In some embodiments, clone CH3C.35.23 may have a knob mutation (e.g., T136W as numbered with reference to SEQ ID NO:99) and at least 85% identity, at least 90% identity, or at least 95% identity to the sequence of SEQ ID NO:141. In some embodiments, clone CH3C.35.23 with the knob mutation has the sequence of SEQ ID NO:141.

[0379] In some embodiments, clone CH3C.35.23 may have a knob mutation (e.g., T136W as numbered with reference to SEQ ID NO:99), mutations that modulate effector function (e.g., L4A, L5A, and/or P99G (e.g., L4A and L5A) as numbered with reference to SEQ ID NO:99), and at least 85% identity, at least 90% identity, or at least 95% identity to the sequence of SEQ ID NO:142 or 143. In some embodiments, clone CH3C.35.23 with the knob mutation and the mutations that modulate effector function has the sequence of SEQ ID NO:142 or 143.

[0380] In some embodiments, clone CH3C.35.23 may have a knob mutation (e.g., T136W as numbered with reference to SEQ ID NO:99), mutations that increase serum stability or serum half-life (e.g., M22Y, S24T, and T26E as numbered with reference to SEQ ID NO:99), and at least 85% identity, at least 90% identity, or at least 95% identity to the sequence of SEQ ID NO:144. In some embodiments, clone CH3C.35.23 with the knob mutation and the mutations that increase serum stability or serum half-life has the sequence of SEQ ID NO:144.

[0381] In some embodiments, clone CH3C.35.23 may have a knob mutation (e.g., T136W as numbered with reference to SEQ ID NO:99), mutations that increase serum stability or serum half-life (e.g., N204S with or without M198L as numbered with reference to SEQ ID NO:99), and at least 85% identity, at least 90% identity, or at least 95% identity to the sequence of SEQ ID NO:145. In some embodiments, clone CH3C.35.23 with the knob mutation and the mutations that increase serum stability or serum half-life has the sequence of SEQ ID NO:145.

[0382] In some embodiments, clone CH3C.35.23 may have a knob mutation (e.g., T136W as numbered with reference to SEQ ID NO:99), mutations that modulate effector function (e.g., L4A, L5A, and/or P99G (e.g., L4A and L5A) as numbered with reference to SEQ ID NO:99), mutations that increase serum stability or serum half-life (e.g., M22Y, S24T, and T26E as numbered with reference to SEQ ID NO:99), and at least 85% identity, at least 90% identity, or at least 95% identity to the sequence of SEQ ID NO:146 or 147. In some embodiments, clone CH3C.35.23 with the knob mutation, the mutations that modulate effector function, and the mutations that increase serum stability or serum half-life has the sequence of SEQ ID NO:146 or 147.

[0383] In some embodiments, clone CH3C.35.23 may have a knob mutation (e.g., T136W as numbered with reference to SEQ ID NO:99), mutations that modulate effector function (e.g., L4A, L5A, and/or P99G (e.g., L4A and L5A) as numbered with reference to SEQ ID NO:99), mutations that increase serum stability or serum half-life (e.g., N204S with or without M198L as numbered with reference to SEQ ID NO:99), and at least 85% identity, at least 90% identity, or at least 95% identity to the sequence of SEQ ID NO:148 or 149. In some embodiments, clone CH3C.35.23 with the knob mutation, the mutations that modulate effector function, and the mutations that increase serum stability or serum half-life has the sequence of SEQ ID NO:148 or 149.

[0384] In some embodiments, clone CH3C.35.23 may have hole mutations (e.g., T136S, L138A, and Y177V as numbered with reference to SEQ ID NO:99) and at least 85% identity, at least 90% identity, or at least 95% identity to the sequence of SEQ ID NO:150. In some embodiments, clone CH3C.35.23 with the hole mutations has the sequence of SEQ ID NO:150.

[0385] In some embodiments, clone CH3C.35.23 may have hole mutations (e.g., T136S, L138A, and Y177V as numbered with reference to SEQ ID NO:99), mutations that modulate effector function (e.g., L4A, L5A, and/or P99G (e.g., L4A and L5A) as numbered with reference to SEQ ID NO:99), and at least 85% identity, at least 90% identity, or at least 95% identity to the sequence of SEQ ID NO:151 or 152. In some embodiments, clone CH3C.35.23 with the hole mutations and the mutations that modulate effector function has the sequence of SEQ ID NO:151 or 152.

[0386] In some embodiments, clone CH3C.35.23 may have hole mutations (e.g., T136S, L138A, and Y177V as numbered with reference to SEQ ID NO:99), mutations that increase serum stability or serum half-life (e.g., M22Y, S24T, and T26E as numbered with reference to SEQ ID NO:99), and at least 85% identity, at least 90% identity, or at least 95% identity to the sequence of SEQ ID NO:153. In some embodiments, clone CH3C.35.23 with the hole mutations and the mutations that increase serum stability or serum half-life has the sequence of SEQ ID NO:153.

[0387] In some embodiments, clone CH3C.35.23 may have hole mutations (e.g., T136S, L138A, and Y177V as numbered with reference to SEQ ID NO:99), mutations that increase serum stability or serum half-life (e.g., N204S with or without M198L as numbered with reference to SEQ ID NO:99), and at least 85% identity, at least 90% identity, or at least 95% identity to the sequence of SEQ ID NO:154. In some embodiments, clone CH3C.35.23 with the hole mutations and the mutations that increase serum stability or serum half-life has the sequence of SEQ ID NO:154.

[0388] In some embodiments, clone CH3C.35.23 may have hole mutations (e.g., T136S, L138A, and Y177V as numbered with reference to SEQ ID NO:99), mutations that modulate effector function (e.g., L4A, L5A, and/or P99G (e.g., L4A and L5A) as numbered with reference to SEQ ID NO:99), mutations that increase serum stability or serum half-life (e.g., M22Y, S24T, and T26E as numbered with reference to SEQ ID NO:99), and at least 85% identity, at least 90% identity, or at least 95% identity to the sequence of SEQ ID NO:155 or 156. In some embodiments, clone CH3C.35.23 with the hole mutations, the mutations that modulate effector function, and the mutations that increase serum stability or serum half-life has the sequence of SEQ ID NO:155 or 156.

[0389] In some embodiments, clone CH3C.35.23 may have hole mutations (e.g., T136S, L138A, and Y177V as numbered with reference to SEQ ID NO:99), mutations that modulate effector function (e.g., L4A, L5A, and/or P99G (e.g., L4A and L5A) as numbered with reference to SEQ ID NO:99), mutations that increase serum stability or serum half-life (e.g., N204S with or without M198L as numbered with reference to SEQ ID NO:99), and at least 85% identity, at least 90% identity, or at least 95% identity to the sequence of SEQ ID NO:157 or 158. In some embodiments, clone CH3C.35.23 with the hole mutations, the mutations that modulate effector function, and the mutations that increase serum stability or serum half-life has the sequence of SEQ ID NO:157 or 158.

[0390] Clone CH3C.35.23.1.1

[0391] In some embodiments, clone CH3C.35.23.1.1 may have a knob mutation (e.g., T136W as numbered with reference to SEQ ID NO:1) and at least 85% identity, at least 90% identity, or at least 95% identity to the sequence of SEQ ID NO:159. In some embodiments, clone CH3C.35.23.1.1 with the knob mutation has the sequence of SEQ ID NO:159.

[0392] In some embodiments, clone CH3C.35.23.1.1 may have a knob mutation (e.g., T136W as numbered with reference to SEQ ID NO:1), mutations that modulate effector function (e.g., L4A, L5A, and/or P99G (e.g., L4A and L5A) as numbered with reference to SEQ ID NO:1), and at least 85% identity, at least 90% identity, or at least 95% identity to the sequence of SEQ ID NO:160 or 161. In some embodiments, clone CH3C.35.23.1.1 with the knob mutation and the mutations that modulate effector function has the sequence of SEQ ID NO:160 or 161.

[0393] In some embodiments, clone CH3C.35.23.1.1 may have a knob mutation (e.g., T136W as numbered with reference to SEQ ID NO:1), mutations that increase serum stability or serum half-life (e.g., M22Y, S24T, and T26E as numbered with reference to SEQ ID NO:1), and at least 85% identity, at least 90% identity, or at least 95% identity to the sequence of SEQ ID NO:162. In some embodiments, clone CH3C.35.23.1.1 with the knob mutation and the mutations that increase serum stability or serum half-life has the sequence of SEQ ID NO:162.

[0394] In some embodiments, clone CH3C.35.23.1.1 may have a knob mutation (e.g., T136W as numbered with reference to SEQ ID NO:1), mutations that increase serum stability or serum half-life (e.g., N204S with or without M198L as numbered with reference to SEQ ID NO:1), and at least 85% identity, at least 90% identity, or at least 95% identity to the sequence of SEQ ID NO:163. In some embodiments, clone CH3C.35.23.1.1 with the knob mutation and the mutations that increase serum stability or serum half-life has the sequence of SEQ ID NO:163.

[0395] In some embodiments, clone CH3C.35.23.1.1 may have a knob mutation (e.g., T136W as numbered with reference to SEQ ID NO:1), mutations that modulate effector function (e.g., L4A, L5A, and/or P99G (e.g., L4A and L5A) as numbered with reference to SEQ ID NO:1), mutations that increase serum stability or serum half-life (e.g., M22Y, S24T, and T26E as numbered with reference to SEQ ID NO:1), and at least 85% identity, at least 90% identity, or at least 95% identity to the sequence of SEQ ID NO:164 or 165. In some embodiments, clone CH3C.35.23.1.1 with the knob mutation, the mutations that modulate effector function, and the mutations that increase serum stability or serum half-life has the sequence of SEQ ID NO:164 or 165.

[0396] In some embodiments, clone CH3C.35.23.1.1 may have a knob mutation (e.g., T136W as numbered with reference to SEQ ID NO:1), mutations that modulate effector function (e.g., L4A, L5A, and/or P99G (e.g., L4A and L5A) as numbered with reference to SEQ ID NO:1), mutations that increase serum stability or serum half-life (e.g., N204S with or without M198L as numbered with reference to SEQ ID NO:1), and at least 85% identity, at least 90% identity, or at least 95% identity to the sequence of SEQ ID NO:166 or 167. In some embodiments, clone CH3C.35.23.1.1 with the knob mutation, the mutations that modulate effector function, and the mutations that increase serum stability or serum half-life has the sequence of SEQ ID NO:166 or 167.

[0397] In some embodiments, clone CH3C.35.23.1.1 may have hole mutations (e.g., T136S, L138A, and Y177V as numbered with reference to SEQ ID NO:1) and at least 85% identity, at least 90% identity, or at least 95% identity to the sequence of SEQ ID NO:168. In some embodiments, clone CH3C.35.23.1.1 with the hole mutations has the sequence of SEQ ID NO:168.

[0398] In some embodiments, clone CH3C.35.23.1.1 may have hole mutations (e.g., T136S, L138A, and Y177V as numbered with reference to SEQ ID NO:1), mutations that modulate effector function (e.g., L4A, L5A, and/or P99G (e.g., L4A and L5A) as numbered with reference to SEQ ID NO:1), and at least 85% identity, at least 90% identity, or at least 95% identity to the sequence of SEQ ID NO:169 or 170. In some embodiments, clone CH3C.35.23.1.1 with the hole mutations and the mutations that modulate effector function has the sequence of SEQ ID NO:169 or 170.

[0399] In some embodiments, clone CH3C.35.23.1.1 may have hole mutations (e.g., T136S, L138A, and Y177V as numbered with reference to SEQ ID NO:1), mutations that increase serum stability or serum half-life (e.g., M22Y, S24T, and T26E as numbered with reference to SEQ ID NO:1), and at least 85% identity, at least 90% identity, or at least 95% identity to the sequence of SEQ ID NO:171. In some embodiments, clone CH3C.35.23.1.1 with the hole mutations and the mutations that increase serum stability or serum half-life has the sequence of SEQ ID NO:171.

[0400] In some embodiments, clone CH3C.35.23.1.1 may have hole mutations (e.g., T136S, L138A, and Y177V as numbered with reference to SEQ ID NO:1), mutations that increase serum stability or serum half-life (e.g., N204S with or without M198L as numbered with reference to SEQ ID NO:1), and at least 85% identity, at least 90% identity, or at least 95% identity to the sequence of SEQ ID NO:172. In some embodiments, clone CH3C.35.23.1.1 with the hole mutations and the mutations that increase serum stability or serum half-life has the sequence of SEQ ID NO:172.

[0401] In some embodiments, clone CH3C.35.23.1.1 may have hole mutations (e.g., T136S, L138A, and Y177V as numbered with reference to SEQ ID NO:1), mutations that modulate effector function (e.g., L4A, L5A, and/or P99G (e.g., L4A and L5A) as numbered with reference to SEQ ID NO:1), mutations that increase serum stability or serum half-life (e.g., M22Y, S24T, and T26E as numbered with reference to SEQ ID NO:1), and at least 85% identity, at least 90% identity, or at least 95% identity to the sequence of SEQ ID NO:173 or 174. In some embodiments, clone CH3C.35.23.1.1 with the hole mutations, the mutations that modulate effector function, and the mutations that increase serum stability or serum half-life has the sequence of SEQ ID NO:173 or 174.

[0402] In some embodiments, clone CH3C.35.23.1.1 may have hole mutations (e.g., T136S, L138A, and Y177V as numbered with reference to SEQ ID NO:1), mutations that modulate effector function (e.g., L4A, L5A, and/or P99G (e.g., L4A and L5A) as numbered with reference to SEQ ID NO:1), mutations that increase serum stability or serum half-life (e.g., N204S with or without M198L as numbered with reference to SEQ ID NO:1), and at least 85% identity, at least 90% identity, or at least 95% identity to the sequence of SEQ ID NO:175 or 176. In some embodiments, clone CH3C.35.23.1.1 with the hole mutations, the mutations that modulate effector function, and the mutations that increase serum stability or serum half-life has the sequence of SEQ ID NO:175 or 176.

### VIII. Formats for TfR-Binding Proteins

[0403] In some embodiments, a modified TfR-binding polypeptide as described herein is a subunit of a protein dimer. In some embodiments, the dimer is a heterodimer. In some embodiments, the dimer is a homodimer. In some embodiments, the dimer comprises a single Fc polypeptide that binds to the TfR receptor, i.e., is monovalent for TfR receptor binding. In some embodiments, the dimer comprises a second polypeptide that binds to the TfR receptor. The second polypeptide may comprise the same modified Fc polypeptide to provide a bivalent homodimer protein, or a second modified Fc polypeptide described herein may provide a second TfR receptor-binding site.

[0404] TfR-binding polypeptides described herein and dimeric or multimeric proteins comprising polypeptides may have a broad range of binding affinities, e.g., based on the format of the polypeptide. For example, in some embodiments, a polypeptide comprising a modified Fc polypeptide as described herein has an affinity for the TfR ranging anywhere from 1 pM to 10 μM. In some embodiments, affinity may be measured in a monovalent format. In other embodiments, affinity may be measured in a bivalent format, e.g., as a protein dimer comprising a modified Fc polypeptide.

[0405] Methods for analyzing binding affinity, binding kinetics, and cross-reactivity to analyze binding to TfR are known in the art. These methods include, but are not limited to, solid-phase binding assays (e.g., ELISA assay), immunoprecipitation, surface plasmon resonance (e.g., Biacore™ (GE Healthcare, Piscataway, N.J.)), kinetic exclusion assays (e.g., KinExA®), flow cytometry, fluorescence-activated cell sorting (FACS), BioLayer interferometry (e.g., Octet® (ForteBio, Inc., Menlo Park, Calif.)), and Western blot analysis. In some embodiments, ELISA is used to determine binding affinity and/or cross-reactivity. Methods for performing ELISA assays are known in the art and are also described in the Example section below. In some embodiments, surface plasmon resonance (SPR) is used to determine binding affinity, binding kinetics, and/or cross-reactivity. In some embodiments, kinetic exclusion assays are used to determine binding affinity, binding kinetics, and/or cross-reactivity. In some embodiments, BioLayer interferometry assays are used to determine binding affinity, binding kinetics, and/or cross-reactivity. FcRn binding of TfR-binding polypeptide may also be evaluated using these types of assays. FcRn binding is typically assayed under acidic conditions, e.g., at a pH of about 5 to about 6.

### IX. TfR-Binding Protein Conjugates

[0406] In some embodiments, an anti-HER2 construct that binds TfR and initiates transport across the BBB, e.g., an Fc polypeptide dimer-antibody variable region fusion protein, or an antibody heavy chain comprising a modified Fc polypeptide as described herein, can further comprises a partial or full hinge region. The hinge region can be from any immunoglobulin subclass or isotype. An illustrative immunoglobulin hinge is an IgG hinge region, such as an IgG1 hinge region, e.g., human IgG1 hinge amino acid sequence EPKSCDKTHTCPPCP (SEQ ID NO:104).

[0407] In still other embodiments, an anti-HER2 construct described herein (e.g., an Fc polypeptide dimer-antibody variable region fusion protein) may be fused to a peptide or protein useful in protein purification, e.g., polyhistidine, epitope tags, e.g., FLAG, c-Myc, hemagglutinin tags and the like, glutathione S transferase (GST), thioredoxin, protein A, protein G, or maltose binding protein (MBP). In some embodiments, purification tags can be fused to an antibody heavy chain. In some cases, the peptide or protein to which the anti-HER2 construct is fused may comprise a protease cleavage site, such as a cleavage site for Factor Xa or Thrombin. In certain embodiments, the linkage is cleavable by an enzyme present in the central nervous system.

[0408] Non-polypeptide agents may also be attached to an anti-HER2 construct (e.g., an Fc polypeptide dimer-antibody variable region fusion protein). Such agents include cytotoxic agents, imaging agents, a DNA or RNA molecule, or a chemical compound. In some embodiments, the agent may be a therapeutic or imaging chemical compound. In some embodiments, the agent is a small molecule, e.g., less than 1000 Da, less than 750 Da, or less than 500 Da.

[0409] An agent, either a polypeptide or non-polypeptide, may be attached to the N-terminal or C-terminal region of the Fc polypeptide dimer-antibody variable region fusion protein or antibody heavy chain, or attached to any region of the Fc polypeptide dimer-antibody variable region fusion protein or antibody heavy chain, so long as the agent does not interfere with binding of the TfR-binding polypeptide to TfR.

[0410] In various embodiments, the conjugates can be generated using well-known chemical cross-linking reagents and protocols. For example, there are a large number of chemical cross-linking agents that are known to those skilled in the art and useful for cross-linking the anti-HER2 construct with an agent of interest. For example, the cross-linking agents are heterobifunctional cross-linkers, which can be used to link molecules in a stepwise manner.

[0411] Heterobifunctional cross-linkers provide the ability to design more specific coupling methods for conjugating proteins, thereby reducing the occurrences of unwanted side reactions such as homo-protein polymers.

[0412] The agent of interest may be a therapeutic agent, including cytotoxic agents and the like, or a chemical moiety. In some embodiments, the agent may be a peptide or small molecule therapeutic or imaging agent.

### X. Co-Targeting of TfR and HER2

[0413] In addition to the use of TfR-binding as a means to enable delivery across the BBB, TfR is also highly expressed in various cancers, including certain HER2⁺ breast cancers. The mechanism by which cancer cells acquire increased TfR expression likely relates to tumor cell proliferation and increased metabolic demand, such as iron uptake. Because the brain penetrating TfR-binding anti-HER2 constructs (e.g., Fc polypeptide dimer-anti-HER2 antibody variable region fusion proteins) described herein contain a TfR-binding portion (e.g., TfR-binding Fc polypeptides) to enable transport across the BBB, there may be additional anti-tumor benefits upon binding to HER2⁺ tumor cells which also express TfR. Specifically, since these anti-HER2 constructs can bind both TfR and HER2 (e.g., bind to both the TfR and HER2 expressed on the same cell) at the same time, this can enhance their potency and/or efficacy.

[0414] As demonstrated in the Examples, we have developed TfR-binding Fc polypeptide dimer-anti-HER2 antibody variable region fusion proteins and have shown that these fusion proteins are capable of crossing the BBB, as well as transporting therapeutics across the BBB. Furthermore, we have demonstrated that co-targeting TfR and HER2 (e.g., subdomain I, II, and/or IV of HER2) by these fusion proteins enhanced cell growth inhibition and cell killing. In particular, as shown in Examples 11-14, the fusion proteins were effective in enhancing cell growth inhibition when, in contrast, there was no effect when targeting HER2 alone or when separate anti-TfR and anti-HER2 molecules were used in a combination, suggesting that binding to both TfR and HER2 with the same molecule is beneficial to achieve cell killing in this context. Thus, the experimental results support that the simultaneous binding, and crosslinking, of TfR and HER2 by a single molecule can potentiate the growth inhibition of HER2⁺ cancer cell lines.

[0415] Accordingly, disclosed herein is a method for treating a cancer or treating brain metastasis of a cancer in a subject that comprises administering to the subject a therapeutically effective amount of an anti-HER2 construct that binds to (a) subdomain I, II, or IV of human HER2 (e.g., subdomain I or II of human HER2) and (b) a transferrin receptor (TfR), wherein the anti-HER2 construct alone is therapeutically effective for treating the cancer. The anti-HER2 construct can be administered to the subject as a monotherapy. In some embodiments, the anti-HER2 construct is adminstered in combination with a chemotherapy or radiation therapy. The anti-HER2 construct can bind to HER2 and TfR on the same cell.

[0416] Also disclosed herein is a method for treating a cancer or treating brain metastasis of a cancer in a subject that comprises administering to the subject a therapeutically effective amount of:

(a) a first anti-HER2 construct that binds to subdomain II of human HER2; and
(b) a second anti-HER2 construct that binds to subdomain IV of human HER2,
or
(a) a first anti-HER2 construct that binds to subdomain I of human HER2; and
(b) a second anti-HER2 construct that binds to subdomain IV of human HER2,
or
(a) a first anti-HER2 construct that binds to subdomain I of human HER2; and
(b) a second anti-HER2 construct that binds to subdomain II of human HER2,
wherein the first and/or the second anti-HER2 construct also binds TfR. In some embodiments of this method, only one of the first and second anti-HER2 constructs binds to both HER2 and TfR.

[0417] In some embodiments, an anti-HER2 construct that binds to both HER2 and TfR can be an Fc polypeptide dimer-antibody variable region fusion protein that comprises an antibody variable region that binds to subdomain I, II, or IV of human HER2 and a modified Fc polypeptide dimer that comprises a first Fc polypeptide that contains modifications that create a TfR-binding site.

[0418] For example, in some embodiments, the Fc polypeptide dimer-antibody variable region fusion protein that binds to subdomain II of human HER2 comprises:

(a) a first heavy chain having the sequence of SEQ ID NO:38, a second heavy chain having the sequence of SEQ ID NO:55;
or
(b) a first heavy chain having the sequence of SEQ ID NO:46, a second heavy chain having the sequence of SEQ ID NO:55;
or
(c) a first heavy chain having the sequence of SEQ ID NO:30, a second heavy chain having the sequence of SEQ ID NO:55.

[0419] For example, in some embodiments, the Fc polypeptide dimer-antibody variable region fusion protein that binds to subdomain I of human HER2 comprises:

(a) a first heavy chain having the sequence of SEQ ID NO:267, a second heavy chain having the sequence of SEQ ID NO:290;
or
(b) a first heavy chain having the sequence of SEQ ID NO:275, a second heavy chain having the sequence of SEQ ID NO:290;
or
(c) a first heavy chain having the sequence of SEQ ID NO:259, a second heavy chain having the sequence of SEQ ID NO:290.

[0420] For example, in some embodiments, the Fc polypeptide dimer-antibody variable region fusion protein that binds to subdomain IV of human HER2 comprises:

(a) a first heavy chain having the sequence of SEQ ID NO:10, a second heavy chain having the sequence of SEQ ID NO:27;
or
(b) a first heavy chain having the sequence of SEQ ID NO:18, a second heavy chain having the sequence of SEQ ID NO:27;
or
(c) a first heavy chain having the sequence of SEQ ID NO:2, a second heavy chain having the sequence of SEQ ID NO:27.

[0421] In other embodiments, an anti-HER2 construct that binds to both HER2 and TfR can be a bispecific construct that comprises an antibody variable region that binds to human HER2 (e.g., subdomain I, II, or IV of human HER2) and an antibody variable region that binds TfR.

### XI. Methods to Increase Effector Function

[0422] For some applications, it is desirable to introduce modifications into anti-HER2 constructs (e.g., Fc polypeptide dimer-antibody variable region fusion proteins) and antibody heavy chains described herein that increase effector function (e.g., ADCC). One method for increasing effector function involves producing anti-HER2 constructs and/or antibody heavy chains that are afucosylated or fucose-deficient.

[0423] One approach for generating fucose-deficient anti-HER2 constructs (e.g., Fc polypeptide dimer-antibody variable region fusion proteins) and antibody heavy chains is to use a fucose analog such as 2-fluorofucose (2-FF). Fucose analogs can deplete or decrease the availability of GDP-fucose, which is a substrate required by fucosyltransferases to incorporate fucose into proteins.

[0424] An alternative approach for generating fucose-deficient anti-HER2 constructs (e.g., Fc polypeptide dimer-antibody variable region fusion proteins) and antibody heavy chains, commonly used for commercial production, is to employ an alpha-1,6 fucosyltransferase (FUT8) knockout cell line for expression of the anti-HER2 constructs (e.g., Fc polypeptide dimer-antibody variable region fusion proteins) or antibody heavy chains. A non-limiting example of a suitable FUT8 knockout cell line is the Chinese hamster ovary (CHO) FUT8 knockout cell line available from Lonza Biologics. Furthermore, as described in Mori et al. (Biotechnol. Bioeng. (2004) 88:901-908; hereby incorporated by reference in its entirety), FUT8 small interfering RNA (siRNA) can be used to convert CHO cell lines (e.g., by constitutive expression of the FUT8 siRNA) for the production of fucose-deficient proteins.

### XII. Nucleic Acids, Vectors, and Host Cells

[0425] The anti-HER2 constructs (e.g., Fc polypeptide dimer-antibody variable region fusion proteins) and antibody heavy chains as described herein are typically prepared using recombinant methods. Accordingly, isolated nucleic acids comprising a nucleic acid sequence encoding any of the anti-HER2 constructs or antibody heavy chains as described herein, and host cells into which the nucleic acids are introduced that are used to replicate the polypeptide-encoding nucleic acids and/or to express the anti-HER2 constructs or antibody heavy chains are provided. In some embodiments, the host cell is eukaryotic, e.g., a human cell.

[0426] In another aspect, polynucleotides are provided that comprise a nucleotide sequence that encodes the anti-HER2 constructs (e.g., Fc polypeptide dimer-antibody variable region fusion proteins) or antibody heavy chains described herein. The polynucleotides may be single-stranded or double-stranded. In some embodiments, the polynucleotide is DNA. In particular embodiments, the polynucleotide is cDNA. In some embodiments, the polynucleotide is RNA.

[0427] In some embodiments, the polynucleotide is included within a nucleic acid construct. In some embodiments, the construct is a replicable vector. In some embodiments, the vector is selected from a plasmid, a viral vector, a phagemid, a yeast chromosomal vector, and a non-episomal mammalian vector.

[0428] In some embodiments, the polynucleotide is operably linked to one or more regulatory nucleotide sequences in an expression construct. In one series of embodiments, the nucleic acid expression constructs are adapted for use as a surface expression library. In some embodiments, the library is adapted for surface expression in yeast. In some embodiments, the library is adapted for surface expression in phage. In another series of embodiments, the nucleic acid expression constructs are adapted for expression of the anti-HER2 construct (e.g., Fc polypeptide dimer-antibody variable region fusion protein) or antibody heavy chain in a system that permits isolation of the polypeptide in milligram or gram quantities. In some embodiments, the system is a mammalian cell expression system. In some embodiments, the system is a yeast cell expression system.

[0429] Expression vehicles for production of a recombinant anti-HER2 construct (e.g., Fc polypeptide dimer-antibody variable region fusion protein) or antibody heavy chain include plasmids and other vectors. For instance, suitable vectors include plasmids of the following types: pBR322-derived plasmids, pEMBL-derived plasmids, pEX-derived plasmids, pBTac-derived plasmids, and pUC-derived plasmids for expression in prokaryotic cells, such as E. coli. The pcDNAI/amp, pcDNAI/neo, pRc/CMV, pSV2gpt, pSV2neo, pSV2-dhfr, pTk2, pRSVneo, pMSG, pSVT7, pko-neo, and pHyg-derived vectors are examples of mammalian expression vectors suitable for transfection of eukaryotic cells. Alternatively, derivatives of viruses such as the bovine papilloma virus (BPV-1), or Epstein-Barr virus (pHEBo, pREP-derived, and p205) can be used for transient expression of polypeptides in eukaryotic cells. In some embodiments, it may be desirable to express the recombinant anti-HER2 construct or antibody heavy chain by the use of a baculovirus expression system. Examples of such baculovirus expression systems include pVL-derived vectors (such as pVL1392, pVL1393, and pVL941), pAcUW-derived vectors (such as pAcUW1), and pBlueBac-derived vectors. Additional expression systems include adenoviral, adeno-associated virus, and other viral expression systems.

[0430] Vectors may be transformed into any suitable host cell. In some embodiments, the host cells, e.g., bacteria or yeast cells, may be adapted for use as a surface expression library. In some cells, the vectors are expressed in host cells to express relatively large quantities of the anti-HER2 construct (e.g., Fc polypeptide dimer-antibody variable region fusion protein) or antibody heavy chain. Such host cells include mammalian cells, yeast cells, insect cells, and prokaryotic cells. In some embodiments, the cells are mammalian cells, such as Chinese Hamster Ovary (CHO) cell, baby hamster kidney (BHK) cell, NSO cell, YO cell, HEK293 cell, COS cell, Vero cell, or HeLa cell.

[0431] A host cell transfected with an expression vector encoding an anti-HER2 construct (e.g., an Fc polypeptide dimer-antibody variable region fusion protein) or antibody heavy chain can be cultured under appropriate conditions to allow expression of the anti-HER2 construct or antibody heavy chain to occur. The anti-HER2 constructs (e.g., Fc polypeptide dimer-antibody variable region fusion proteins) or antibody heavy chains may be secreted and isolated from a mixture of cells and medium containing the anti-HER2 constructs or antibody heavy chains. Alternatively, the anti-HER2 construct (e.g., Fc polypeptide dimer-antibody variable region fusion protein) or antibody heavy chain may be retained in the cytoplasm or in a membrane fraction and the cells harvested, lysed, and the anti-HER2 construct or antibody heavy chain isolated using a desired method.

### XIII. Therapeutic Methods

[0432] In some aspects, provided herein are methods transcytosis of an antibody variable region that is capable of binding HER2 (e.g., human HER2), or an antigen-binding fragment thereof, across an endothelium. In some embodiments, the methods comprise contacting the endothelium with a composition comprising an anti-HER2 construct (e.g., an Fc polypeptide dimer-antibody variable region fusion protein) described herein. In some embodiments, the endothelium is the blood brain barrier (BBB).

[0433] In other aspects, provided herein are methods for treating cancer (e.g., a HER2-positive cancer) in a subject. In some embodiments, the methods comprise administering to the subject a therapeutically effective amount of an anti-HER2 construct (e.g., an Fc polypeptide dimer-antibody variable region fusion protein) described herein. Any number of HER2-positive cancers can be treated according to the methods provided herein. Non-limiting examples include HER2-positive breast, ovarian, bladder, salivary gland, endometrial, pancreatic, and non-small-cell lung cancer (NSCLC), as well as HER2-positive gastric adenocarcinoma and/or a HER2-positive gastroesophageal junction adnocarcinoma. In some embodiments, the HER2-positive cancer is a HER2-positive breast cancer. In some embodiments, the HER2-positive cancer is a HER2-positive gastric adenocarcinoma and/or a HER2-positive gastroesophageal junction adnocarcinoma. In some embodiments, the HER2-positive cancer is a metastatic cancer.

[0434] In still other aspects, provided herein are methods for treating metastasis of a cancer (e.g., a HER2-positive cancer). In some embodiments, the methods comprise administering to the subject a therapeutically effective amount of an anti-HER2 construct (e.g., an Fc polypeptide dimer-antibody variable region fusion protein) described herein. In some embodiments, the metastasis is a brain metastasis of a HER2-positive cancer described above. In some embodiments, the metastasis is a brain metastasis of a HER2-positive breast cancer. In some embodiments, the metastasis is a brain metastasis of a HER2-positive gastric adenocarcinoma and/or a HER2-positive gastroesophageal junction adnocarcinoma.

[0435] In some embodiments, the anti-HER2 construct (e.g., Fc polypeptide dimer-antibody variable region fusion protein) comprises an anti-HER2 subdomain IV antibody variable region. In some embodiments, the anti-HER2 construct (e.g., Fc polypeptide dimer-antibody variable region fusion protein) comprises an anti-HER2 subdomain II antibody variable region. In some embodiments, the anti-HER2 construct (e.g., Fc polypeptide dimer-antibody variable region fusion protein) comprises an anti-HER2 subdomain I antibody variable region. In some embodiments, both an anti-HER2 construct (e.g., Fc polypeptide dimer-antibody variable region fusion protein) that comprises an anti-HER2 subdomain IV antibody variable region and an anti-HER2 construct (e.g., Fc polypeptide dimer-antibody variable region fusion protein) that comprises an anti-HER2 subdomain II antibody variable region are administered to the subject. In some embodiments, both an anti-HER2 construct (e.g., Fc polypeptide dimer-antibody variable region fusion protein) that comprises an anti-HER2 subdomain IV antibody variable region and an anti-HER2 construct (e.g., Fc polypeptide dimer-antibody variable region fusion protein) that comprises an anti-HER2 subdomain I antibody variable region are administered to the subject. In some embodiments, both an anti-HER2 construct (e.g., Fc polypeptide dimer-antibody variable region fusion protein) that comprises an anti-HER2 subdomain I antibody variable region and an anti-HER2 construct (e.g., Fc polypeptide dimer-antibody variable region fusion protein) that comprises an anti-HER2 subdomain II antibody variable region are administered to the subject.

[0436] In some embodiments, a first Fc polypeptide dimer-antibody variable region fusion protein and a second Fc polypeptide dimer-antibody variable region fusion protein are administered to the subject. In some instances, the antibody variable region of the first Fc polypeptide dimer-antibody variable region fusion protein comprises two antibody heavy chain variable regions comprising the amino acid sequence of SEQ ID NO:59 and two light chain variable regions comprising the amino acid sequence of SEQ ID NO:60. In some instances, the antibody variable region of the second Fc polypeptide dimer-antibody variable region fusion protein comprises two antibody heavy chain variable regions comprising the amino acid sequence of SEQ ID NO:61 and two light chain variable regions comprising the amino acid sequence of SEQ ID NO:62. In some instances, the antibody variable region of the first Fc polypeptide dimer-antibody variable region fusion protein comprises two antibody heavy chain variable regions comprising the amino acid sequence of SEQ ID NO:256 and two light chain variable regions comprising the amino acid sequence of SEQ ID NO:257.

[0437] In some embodiments, administering a combination of Fc polypeptide dimer-antibody variable region fusion proteins that target both subdomain IV and subdomain II of HER2 produces a greater therapeutic benefit than when only an Fc polypeptide dimer-antibody variable region fusion protein that targets subdomain IV or subdomain II is administered. In some embodiments, administering a combination of Fc polypeptide dimer-antibody variable region fusion proteins that target both subdomain IV and subdomain I of HER2 produces a greater therapeutic benefit than when only an Fc polypeptide dimer-antibody variable region fusion protein that targets subdomain IV or subdomain I is administered. In some embodiments, administering a combination of Fc polypeptide dimer-antibody variable region fusion proteins that target both subdomain II and subdomain I of HER2 produces a greater therapeutic benefit than when only an Fc polypeptide dimer-antibody variable region fusion protein that targets subdomain II or subdomain I is administered.

[0438] In some embodiments, administering an Fc polypeptide dimer-antibody variable region fusion protein that targets HER2 subdomain IV alone is more effective for inhibiting breast cancer cell growth than using an anti-HER2 subdomain IV antibody alone. In some embodiments, administering an Fc polypeptide dimer-antibody variable region fusion protein that targets HER2 subdomain II alone is more effective for inhibiting breast cancer cell growth than using an anti-HER2 subdomain II antibody alone. In some embodiments, administering an Fc polypeptide dimer-antibody variable region fusion protein that targets HER2 subdomain I alone is more effective for inhibiting breast cancer cell growth than using an anti-HER2 subdomain I antibody alone.

[0439] Further, in some embodiments, administering an Fc polypeptide dimer-antibody variable region fusion protein that targets HER2 subdomain IV alone is more effective for inhibiting breast cancer cell growth than using a combination of an anti-HER2 subdomain IV antibody and an anti-TfR antibody. In some embodiments, administering an Fc polypeptide dimer-antibody variable region fusion protein that targets HER2 subdomain II alone was more effective for inhibiting breast cancer cell growth than using a combination of an anti-HER2 subdomain II antibody and an anti-TfR antibody. In some embodiments, administering an Fc polypeptide dimer-antibody variable region fusion protein that targets HER2 subdomain I alone was more effective for inhibiting breast cancer cell growth than using a combination of an anti-HER2 subdomain I antibody and an anti-TfR antibody.

[0440] In other embodiments, using an anti-HER2 construct that includes an antibody variable region that is capable of binding HER2 (e.g., subdomain I, II, or IV of human HER2) and an antibody variable region that is capable of binding TfR is more effective for inhibiting breast cancer cell growth than using an anti-HER2 antibody alone (e.g., an anti-HER2 subdomain I antibody, an anti-HER2 subdomain II antibody, or an anti-HER2 subdomain IV antibody) or using separate anti-TfR and anti-HER2 (e.g., an anti-HER2 subdomain I, an anti-HER2 subdomain II, or an anti-HER2 subdomain IV) antibodies in a combination.

[0441] In some embodiments, the therapeutic benefit can comprise a decrease in or slowing of tumor growth, a decrease in tumor size (e.g., volume), a decrease in tumor cell viability, a decrease in the number of metastatic lesions, amelioration in one or more signs or symptoms of a cancer (e.g., HER2-positive cancer), and/or an increase in patient survival. In some embodiments, tumor cell survival, tumor growth, tumor size, and/or the number of metastatic lesions is decreased by at least about 10%, 20%, 30%, 40%, 50%, 60%, 70%, 80%, 90%, or more.

[0442] In some embodiments, the anti-HER2 construct (e.g., Fc polypeptide dimer-antibody variable region fusion protein) antagonizes HER2 activity. In some embodiments, HER2 activity is inhibited (e.g., by at least about 10%, 20%, 30%, 40%, 50%, 60%, 70%, 80%, 90%, or more).

[0443] In some embodiments, the subject has not been previously treated with an anti-HER2 therapy. In some embodiments, the subject has not been previously treated with a chemotherapy for metastatic disease. In some embodiments, the subject has not been previously treated with an anti-HER2 therapy and/or a chemotherapy for metastatic disease.

[0444] In some embodiments, the methods further comprise administering to the subject one or more other therapeutic agents or treatments. The additional therapeutic agents or treatments can comprise, for example, chemotherapy, immunotherapy, radiotherapy, hormone therapy, a differentiating agent, a small-molecule drug, or a combination thereof.

[0445] In some embodiments, an anti-HER2 construct (e.g., an Fc polypeptide dimer-antibody variable region fusion protein) is administered to a subject at a therapeutically effective amount or dose. A daily dose range of about 0.01 mg/kg to about 500 mg/kg, or about 0.1 mg/kg to about 200 mg/kg, or about 1 mg/kg to about 100 mg/kg, or about 10 mg/kg to about 50 mg/kg, can be used. The dosages, however, may be varied according to several factors, including the chosen route of administration, the formulation of the composition, patient response, the severity of the condition, the subject's weight, and the judgment of the prescribing physician. The dosage can be increased or decreased over time, as required by an individual patient. In certain instances, a patient initially is given a low dose, which is then increased to an efficacious dosage tolerable to the patient. Determination of an effective amount is well within the capability of those skilled in the art.

[0446] The route of administration of an anti-HER2 construct (e.g., an Fc polypeptide dimer-antibody variable region fusion protein) as described herein can be oral, intraperitoneal, transdermal, subcutaneous, intravenous, intramuscular, intrathecal, inhalational, topical, intralesional, rectal, intrabronchial, nasal, transmucosal, intestinal, ocular or otic delivery, or any other methods known in the art. In some embodiments, the anti-HER2 construct (e.g., Fc polypeptide dimer-antibody variable region fusion protein) is administered orally, intravenously, or intraperitoneally.

[0447] Co-administration of multiple anti-HER2 constructs (e.g., multiple Fc polypeptide dimer-antibody variable region fusion proteins) or an anti-HER2 construct (e.g., an Fc polypeptide dimer-antibody variable region fusion protein) and an additional therapeutic agent can be performed together or separately, simultaneously or at different times. When administered, the therapeutic agents independently can be administered once, twice, three, four times daily or more or less often, as needed. In some embodiments, the administered therapeutic agents are administered once daily. In some embodiments, the administered therapeutic agents are administered at the same time or times, for instance as an admixture. In some embodiments, one or more of the therapeutic agents is administered in a sustained-release formulation.

[0448] In some embodiments, the combination of multiple anti-HER2 constructs (e.g., multiple Fc polypeptide dimer-antibody variable region fusion proteins) or the combination of an anti-HER2 construct (e.g., an Fc polypeptide dimer-antibody variable region fusion protein) and another therapeutic agent is administered concurrently. In some embodiments, the agents are administered sequentially. For example, a first agent (e.g., a first Fc polypeptide dimer-antibody variable region fusion protein) can be administered for about 1, 2, 3, 4, 5, 6, 7, 8, 9, 10, 15, 20, 25, 30, 40, 50, 60, 70, 80, 90, 100 days or more prior to administering a second Fc polypeptide dimer-antibody variable region fusion protein or another agent, or vice versa.

[0449] In some embodiments, the anti-HER2 constructs (e.g., Fc polypeptide dimer-antibody variable region fusion proteins) (and optionally another therapeutic agent) are administered to the subject over an extended period of time, e.g., for at least 30, 40, 50, 60, 70, 80, 90, 100, 150, 200, 250, 300, 350 days or longer.

### XIV. Pharmaceutical Compositions and Kits

[0450] In another aspect, pharmaceutical compositions and kits comprising an anti-HER2 construct (e.g., an Fc polypeptide dimer-antibody variable region fusion protein) and/or an antibody heavy chain described herein are provided. In some embodiments, the pharmaceutical compositions and kits are for use in transcytosing an antibody variable region that is capable of binding HER2 across an endothelium (e.g., the BBB) in a subject. In some embodiments, the pharmaceutical compositions and kits are for use in treating a HER2-positive cancer or a metastatic lesion thereof (e.g., in a subject).

[0451] Pharmaceutical Compositions

[0452] In some embodiments, pharmaceutical compositions comprising an anti-HER2 construct (e.g., an Fc polypeptide dimer-antibody variable region fusion protein) or antibody heavy chain are provided. In some embodiments, the pharmaceutical compositions comprise an Fc polypeptide dimer-antibody variable region fusion protein or antibody heavy chain that comprises an anti-HER2 subdomain IV antibody variable region. In some embodiments, the pharmaceutical compositions comprise an Fc polypeptide dimer-antibody variable region fusion protein or antibody heavy chain that comprises an anti-HER2 subdomain II antibody variable region. In some embodiments, the pharmaceutical compositions comprise an Fc polypeptide dimer-antibody variable region fusion protein or antibody heavy chain that comprises an anti-HER2 subdomain I antibody variable region. In some embodiments, the pharmaceutical compositions comprise an Fc polypeptide dimer-antibody variable region fusion protein or antibody heavy chain that comprises an anti-HER2 subdomain IV antibody variable region and an Fc polypeptide dimer-antibody variable region fusion protein or antibody heavy chain that comprises an anti-HER2 subdomain II antibody variable region. In some embodiments, the pharmaceutical compositions comprise an Fc polypeptide dimer-antibody variable region fusion protein or antibody heavy chain that comprises an anti-HER2 subdomain IV antibody variable region and an Fc polypeptide dimer-antibody variable region fusion protein or antibody heavy chain that comprises an anti-HER2 subdomain I antibody variable region. In some embodiments, the pharmaceutical compositions comprise an Fc polypeptide dimer-antibody variable region fusion protein or antibody heavy chain that comprises an anti-HER2 subdomain I antibody variable region and an Fc polypeptide dimer-antibody variable region fusion protein or antibody heavy chain that comprises an anti-HER2 subdomain II antibody variable region.

[0453] In some embodiments, a pharmaceutical composition comprises an anti-HER2 construct (e.g., an Fc polypeptide dimer-antibody variable region fusion protein) or antibody heavy chain as described herein and further comprises one or more pharmaceutically acceptable carriers and/or excipients. A pharmaceutically acceptable carrier includes any solvents, dispersion media, or coatings that are physiologically compatible and that preferably does not interfere with or otherwise inhibit the activity of the active agent. Various pharmaceutically acceptable excipients are well-known in the art.

[0454] In some embodiments, the carrier is suitable for intravenous, intramuscular, oral, intraperitoneal, intrathecal, transdermal, topical, or subcutaneous administration. Pharmaceutically acceptable carriers can contain one or more physiologically acceptable compound(s) that act, for example, to stabilize the composition or to increase or decrease the absorption of the active agent(s). Physiologically acceptable compounds can include, for example, carbohydrates, such as glucose, sucrose, or dextrans, antioxidants, such as ascorbic acid or glutathione, chelating agents, low molecular weight proteins, compositions that reduce the clearance or hydrolysis of the active agents, or excipients or other stabilizers and/or buffers. Other pharmaceutically acceptable carriers and their formulations are well-known in the art.

[0455] The pharmaceutical compositions described herein can be manufactured in a manner that is known to those of skill in the art, e.g., by means of conventional mixing, dissolving, granulating, dragee-making, emulsifying, encapsulating, entrapping, or lyophilizing processes. The following methods and excipients are merely exemplary and are in no way limiting.

[0456] For oral administration, an anti-HER2 construct (e.g., an Fc polypeptide dimer-antibody variable region fusion protein) or antibody heavy chain can be formulated by combining it with pharmaceutically acceptable carriers that are well known in the art. Such carriers enable the compounds to be formulated as tablets, pills, dragees, capsules, emulsions, lipophilic and hydrophilic suspensions, liquids, gels, syrups, slurries, suspensions and the like, for oral ingestion by a patient to be treated. Pharmaceutical preparations for oral use can be obtained by mixing the compounds with a solid excipient, optionally grinding a resulting mixture, and processing the mixture of granules, after adding suitable auxiliaries, if desired, to obtain tablets or dragee cores. Suitable excipients include, for example, fillers such as sugars, including lactose, sucrose, mannitol, or sorbitol; cellulose preparations such as, for example, maize starch, wheat starch, rice starch, potato starch, gelatin, gum tragacanth, methyl cellulose, hydroxypropylmethyl-cellulose, sodium carboxymethylcellulose, and/or polyvinylpyrrolidone (PVP). If desired, disintegrating agents can be added, such as a cross-linked polyvinyl pyrrolidone, agar, or alginic acid or a salt thereof such as sodium alginate.

[0457] An anti-HER2 construct (e.g., An Fc polypeptide dimer-antibody variable region fusion protein) or antibody heavy chain can be formulated for parenteral administration by injection, e.g., by bolus injection or continuous infusion. For injection, the compound or compounds can be formulated into preparations by dissolving, suspending or emulsifying them in an aqueous or nonaqueous solvent, such as vegetable or other similar oils, synthetic aliphatic acid glycerides, esters of higher aliphatic acids or propylene glycol; and if desired, with conventional additives such as solubilizers, isotonic agents, suspending agents, emulsifying agents, stabilizers and preservatives. In some embodiments, compounds can be formulated in aqueous solutions, preferably in physiologically compatible buffers such as Hanks's solution, Ringer's solution, or physiological saline buffer. Formulations for injection can be presented in unit dosage form, e.g., in ampules or in multi-dose containers, with an added preservative. The compositions can take such forms as suspensions, solutions or emulsions in oily or aqueous vehicles, and can contain formulatory agents such as suspending, stabilizing and/or dispersing agents.

[0458] Typically, a pharmaceutical composition for use in in vivo administration is sterile. Sterilization can be accomplished according to methods known in the art, e.g., heat sterilization, steam sterilization, sterile filtration, or irradiation.

[0459] Dosages and desired drug concentration of pharmaceutical compositions of the disclosure may vary depending on the particular use envisioned. The determination of the appropriate dosage or route of administration is well within the skill of one in the art. Suitable dosages are also described herein.

[0460] Kits

[0461] In some embodiments, kits comprising an anti-HER2 construct (e.g., an Fc polypeptide dimer-antibody variable region fusion protein) or antibody heavy chain as described herein (e.g., as described above), or a pharmaceutical composition described herein, are provided. In some embodiments, the kits comprise an Fc polypeptide dimer-antibody variable region fusion protein or antibody heavy chain that comprises an anti-HER2 subdomain IV antibody variable region. In some embodiments, the kits comprise an Fc polypeptide dimer-antibody variable region fusion protein or antibody heavy chain that comprises an anti-HER2 subdomain II antibody variable region. In some embodiments, the kits comprise an Fc polypeptide dimer-antibody variable region fusion protein or antibody heavy chain that comprises an anti-HER2 subdomain I antibody variable region. In some embodiments, the kits comprise an Fc polypeptide dimer-antibody variable region fusion protein or antibody heavy chain that comprises an anti-HER2 subdomain IV antibody variable region and an Fc polypeptide dimer-antibody variable region fusion protein or antibody heavy chain that comprises an anti-HER2 subdomain II antibody variable region. In some embodiments, the kits comprise an Fc polypeptide dimer-antibody variable region fusion protein or antibody heavy chain that comprises an anti-HER2 subdomain IV antibody variable region and an Fc polypeptide dimer-antibody variable region fusion protein or antibody heavy chain that comprises an anti-HER2 subdomain I antibody variable region. In some embodiments, the kits comprise an Fc polypeptide dimer-antibody variable region fusion protein or antibody heavy chain that comprises an anti-HER2 subdomain I antibody variable region and an Fc polypeptide dimer-antibody variable region fusion protein or antibody heavy chain that comprises an anti-HER2 subdomain II antibody variable region. In some embodiments, the kits are for use in transcytosing an antibody variable region that is capable of binding HER2 across an endothelium (e.g., the BBB) in a subject. In some embodiments, the kits are for use in treating a HER2-positive cancer or a metastatic lesion thereof (e.g., in a subject).

[0462] In some embodiments, the kit further comprises instructional materials containing directions (i.e., protocols) for the practice of the methods described herein (e.g., instructions for using the kit contents for treating a cancer or metastatic lesion thereof such as a HER2-positive cancer). While the instructional materials typically comprise written or printed materials they are not limited to such. Any medium capable of storing such instructions and communicating them to an end user is contemplated. Such media include, but are not limited to electronic storage media (e.g., magnetic discs, tapes, cartridges, chips), optical media (e.g., CD-ROM), and the like. Such media may include addresses to internet sites that provide such instructional materials.

### XV. Examples

[0463] The following examples are included to demonstrate specific embodiments of the disclosure. It should be appreciated by those of skill in the art that the techniques disclosed in the examples which follow represent techniques to function well in the practice of the disclosure, and thus can be considered to constitute specific modes for its practice. However, those of skill in the art should, in light of the present disclosure, appreciate that many changes can be made in the specific embodiments which are disclosed and still obtain a like or similar result without departing from the spirit and scope of the disclosure.

### Example 1. Generation of Fc Polypeptide Dimer-Fab Fusion Proteins Having a Cis LALA Configuration with HER2 Binding Sites Against Subdomains II and IV

[0464] We have engineered a TfR-binding polypeptide in which the Fc polypeptide dimers contains the LALA mutation in one Fc polypeptide in the cis configuration. This TfR-binding polypeptide was able to attenuate blood and bone marrow reticulocyte depletion in mice, which was previously seen in the TfR-binding polypeptide with WT IgG. Importantly, upon binding to the Fab target, the TfR-binding polypeptide having the cis LALA configuration was able to elicit in vitro Fab target-mediated ADCC and CDC, as well as elicit an in vivo effector function immune response towards the target of interest. Based on these results, we rationalize that this molecule could be paired with specific Fab arms and become a brain-penetrant therapeutic that could both retain reticulocyte safety and elicit effector function towards the therapeutic target of interest.

[0465] In this example, as well as Examples 2-5 below, Fc polypeptide dimer-antibody variable region fusion proteins were created in which HER2 binding sites were engineered into the Fab arms of a TfR-binding polypeptide. Treatment of HER2-positive breast cancer has been very successful with therapies using anti-HER2_DIV (comprising heavy and light chains having the amino acid sequences set forth in SEQ ID NOS:97 and 57, respectively) and anti-HER2_DII (comprising heavy and light chains having the amino acid sequences set forth in SEQ ID NOS:98 and 58, respectively).

[0466] The Fc polypeptide dimer-antibody variable region fusion proteins used in this example, and Examples 2-5 below, were generated with HER2 Fab-binding sites fused to a modified Fc polypeptide dimer having a first Fc polypeptide that was a TfR-binding polypeptide (CH3C.35.23.1.1, having a LALA mutation) and a second Fc polypeptide that did not have a TfR-binding site or any modifications that reduce FcγR binding—these anti-HER2 constructs being referred to as HER2-35.23.1^{cisLALA}. Specifically, the anti-HER2 subdomain IV construct, HER2_DIV-35.23.1.1^{cisLALA} was an Fc polypeptide dimer-antibody variable region fusion protein having a first heavy chain comprising SEQ ID NO:2, a second heavy chain comprising SEQ ID NO:27, and two light chains comprising SEQ ID NO:57, and the anti-HER2 subdomain II construct, HER2_DII-35.23.1.1^{cisLALA} was an Fc polypeptide dimer-antibody variable region fusion protein having a first heavy chain comprising SEQ ID NO:30, a second heavy chain comprising SEQ ID NO:55, and two light chains comprising SEQ ID NO:58.

[0467] To confirm that the presence of a TfR-binding site in the Fc did not alter the binding affinity for HER2, we determined the binding coefficient (K_{D}) to HER2 extracellular domain protein using Biacore™. As expected, the binding affinity for HER2 using an extracellular domain protein was not altered in the T Fc polypeptide dimer-antibody variable region fusion protein that had either HER2 binding sequences against HER2 subdomain IV or II in the Fab arm (FIG. 1A ant Table 1). These results were compared to the binding affinities of anti-HER2 DIV and anti-HER2_DII.

TABLE 1
Binding affinities for HER2 extracellular domain.

| Molecule | Isotype | K_{D} (nM) |
|---|---|---|
| anti- HER2_DIV | huIgG1 | 1.2 |
| 35.23.1.1:HER2_DIV | huIgG1 | 0.8 |
| 35.23.1.1:HER2_DIV | huIgG1.LALA.knob | 1.1 |
| 35.23.1.1:HER2_DIV | huIgG1.LALA | 0.8 |
| anti-HER2_DII | huIgG1 | 2.0 |
| 35.23.1.1:HER2_DII | huIgG1.LALA.knob | 1.5 |

[0468] To confirm that the addition of HER2 binding sites did not alter the binding affinity for TfR at the TfR-binding domain in the Fc polypeptide, we also compared the TfR-binding affinities of various Fc polypeptide dimer-antibody variable region fusion proteins. The affinities for TfR did not differ significantly between HER2_DIV-35.23.1.1^{cisLALA} and HER2_DII-35.23.1.1^{cisLALA} (601 nM and 620 nM, respectively) (FIG. 1B and Table 2).

TABLE 2
Binding affinities for apical hTfR.

| Molecule | Isotype | K_{D} (nM) |
|---|---|---|
| ATV35.23.1.1:Her2_DIV | huIgG1 | 626 |
| ATV35.23.1.1:Her2_DIV | huIgG1.LALA.knob | 601 |
| ATV35.23.1.1:Her2_DIV | huIgG1.LALA | 607 |
| ATV35.23.1.1:Her2_DII | huIgG1.LALA.knob | 620 |

### Example 2. BT474 Inhibition by Fc Polypeptide Dimer-Fab Fusion Proteins Having HER2 Fab-Binding Sites

[0469] The ability of HER2_DIV-35.23.1.1^{cisLALA} to inhibit cancer cell proliferation was evaluated in a HER2-positive breast cancer cell line. BT474 cells were plated overnight at 10,000 cells/well in a 96-well plate, treated with 60 μL of 1:3 serial dilution of molecules of interest beginning at 25,000 ng/mL. Media and drugs were replenished on Day 3. On Day 6, cell growth was determined using 5 μL of WST-1 reagent in 50 μL of growth media. The plate was incubated for 4 hours in the presence of WST-1 reagent, and absorbance was determined at 440 nm. The percent of growth inhibition/proliferation was normalized to the untreated control.

[0470] HER2_DIV-35.23.1.1^{cisLALA} had the ability to inhibit growth of BT474 cells in a manner similar to anti-HER2_DIV. The addition of a TfR-binding site at the Fc did not interfere with the degree of growth inhibition (FIG. 2 and Table 3).

TABLE 3
IC₅₀ values for BT474 growth inhibition assay.

| Molecule | IC₅₀ (nM) |
|---|---|
| anti-HER2_DIV | 1.30 ± 0.22 |
| 35.23.1.1^{cisLALA}:HER2_DIV | 0.986 ± 0.30 |
| anti-HER2_DIV + anti-Her2_DII | 1.66 ± 0.18 |
| 35.23.1.1^{cisLALA}:Her2_DIV + | 0.500 ± 0.056 |
| 35.23.1.1^{cisLALA}:Her2_DII | |

### Example 3. Decreased pAKT Protein Levels in HER2-Positive Breast Cancer Cell Line BT474

[0471] HER2 amplification is known to dysregulate the downstream PI3K/Akt signaling pathway. Small molecule inhibitors or antibodies that target HER2 decrease phosphorylated AKT (pAKT) and prevent EGFR activation and downstream signaling mechanisms in HER2-positive breast cancer cells. The reduction of pAKT protein level serves as a useful readout to determine target engagement. Importantly, anti-HER2_DIV robustly decreases pAkt protein level in various breast cancer cell lines, including BT474. Conversely, in tumors that have increased pAkt level, there is also increased resistance to anti-HER2_DIV treatment that is observed.

[0472] Immunoblotting was used to assess the protein expression level of pAKT in BT474 upon treatment with HER2_DIV-35.23.11^{cisLALA} BT474 cells were plated overnight at 100,000-200,000 cells/well in a 24-well plate. Cells were treated at 50 μg/mL for 2 hours, washed twice with PBS, and lysate was harvested using RIPA buffer with complete protease inhibitor. 8 μl of protein lysate was added to each well and proteins were blotted and analyzed using anti-pAKT, anti-AKT, and anti-b-actin at 1:1,000. Bands were visualized and analyzed using the Li-CORE imaging system.

[0473] Consistent with growth inhibition properties in BT474 cells, HER2_DIV-35.23.1.1^{cisLALA} significantly decreased pAKT protein levels compared to untreated control (FIG. 3). This data demonstrates that HER2_DIV-35.23.1.1^{cisLALA} engaged HER2-positive breast cancer cells in a similar manner as anti-HER2_DIV, by inhibiting downstream PI3K/Akt signaling pathways.

### Example 4. Combination Treatment for Inhibition of BT474 Cells

[0474] The combination of anti-HER2_DIV and anti-HER2_DII has demonstrated superior clinical activity in metastatic cancer and is currently the standard of care for HER2-positive breast cancer patients. Anti-HER2_DII binds to subdomain II of HER2 and prevents heterodimerization with HER3 and EGFR. Interestingly, anti-HER2_DII alone is not as effective as anti-HER2_DIV alone. When it is combined with anti-HER2_DIV, it has stronger antitumor activity in HER2-positive breast cancer better than anti-HER2_DIV monotherapy. Importantly, the combination therapy has also demonstrated more effectiveness in tumors that are resistant to anti-HER2_DIV.

[0475] As mentioned above, in addition to HER2_DIV-35.23.1.1^{cisLALA}, an Fc polypeptide dimer-antibody variable region fusion protein having binding sites against HER2 subdomain II (HER2_DII-35.23.1.1^{cisLALA}) was also generated. BT474 cells were treated with the combination of both Fc polypeptide dimer-antibody variable region fusion proteins; growth inhibition was evaluated by WST1 viability assay as described above. Remarkably, the combination of HER2_DIV-35.23.1.1^{cisLALA} and HER2_DII-35.23.1.1^{cisLALA} led to more potent growth inhibition than the combination of anti-HER2_DIV and anti-HER2_DII (FIG. 2).

[0476] Because combination therapy of anti-HER2_DIV and anti-HER2_DII is also known to overcome tumor resistance, we next tested the ability of the combination of HER2_DIV-35.23.1.1^{cisLALA} and HER2_DII-35.23.1.1^{cisLALA} to overcome tumor resistance in a neuregulin 1-induced resistance model. Neuregulin 1 (NRG-1) is a ligand for HER3 and is enriched in the brain microenvironment and has been shown to be a potent inducer of resistance to PI3K inhibitor in HER2-amplified breast cancer cell lines. Specifically, NRG-1 activates HER3 signaling pathways and initiates HER2-HER3 dimerization. This in turn leads to activation of the PI3K/Akt pathway and render the tumor cells more resistant to anti-HER2_DIV treatment. In the presence of NRG1 (50 ng/mL), BT474 breast cancer cells were indeed resistant to anti-HER2_DIV or HER2_DIV-35.23.1.1^{cisLALA} (FIG. 4). Nonetheless, binding HER2 at subdomain IV and II through the combination treatment of anti-HER2_DIV and anti-HER2_DII overcame this resistance, consistent with published data (FIG. 4). Furthermore, in the presence of NRG1, the combination of HER2_DIV-35.23.1.1^{cisLALA} and HER2_DII-35.23.1.1^{cisLALA} was more potent than the combination of anti-HER2_DIV and anti-HER2_DII, as determined by WST1 growth inhibition assay in BT474 cells (FIG. 4 and Table 4). These results demonstrate that the combination of HER2_DIV-35.23.1.1^{cisLALA} and HER2_DII-35.23.1.1^{cisLALA} not only decreased breast cancer cell proliferation in vitro, but surprisingly, was also more potent than the combination of anti-HER2_DIV and anti-HER2_DII.

[0477] Because increasing preclinical and clinical data suggest that HER2-positive breast cancer brain metastasis (BCBM) is more resistant to anti-HER2_DIV than peripheral tumor, and that targeting HER2-HER3 dimerization is a strategy to overcome this resistance, the combination of HER2_DIV-35.23.1.1^{cisLALA} and HER2_DII-35.23.1.1^{cisLALA} can enable 1) delivery of the therapeutic across the blood brain barrier to access HER2-positive BCBM, and 2) inhibit cancer cell proliferation that have become resistant to anti-HER2_DIV as a result of the brain microenvironment.

TABLE 4
IC₅₀ values for BT474 growth inhibition assay.

| Molecule | IC₅₀ (nM) |
|---|---|
| anti-HER2_DIV | — |
| 35.23.1.1^{cisLALA}:Her2_DIV | — |
| anti-HER2_DIV + anti-Her2_DII | 4.63 ± 0.55 |
| 35.23.1.1^{cisLALA}:Her2_DIV + | 1.61 ± 0.18 |
| 35.23.1.1^{cisLALA}:Her2_DII | |

[0478] Similar to anti-HER2_DIV, a combination of anti-HER2_DIV and anti-HER2_DII robustly decreased pAKT protein levels. The combination of HER2_DIV-35.23.1.1^{cisLALA} and HER2_DII-35.23.1.1^{cisLALA} also robustly decreased pAKT protein level (FIG. 5). In the presence of NRG1 (50 ng/mL), which leads to increased tumor cell resistance as demonstrated by increased pAKT protein levels, the combination of HER2_DIV-35.23.1.1^{cisLALA} and HER2_DII-35.23.1.1^{cisLALA}] (at 50 μg/mL each, for 2 hours) also robustly decreased pAKT protein levels (FIG. 5). This result was consistent with the growth inhibition that was observed upon NRG1-induced resistance in BT474 cells (FIG. 4).

### Example 5. Fc Polypeptide Dimer-Fab Fusion Proteins Elicit Fab-Mediated ADCC in HER2-Positive Breast Cancer Cells

[0479] Increasing literature indicates that effector function such as ADCC is an important component of the antitumor mechanism of anti-HER2_DIV. In addition, studies with FcγR knock-out mice have shown that the anti-tumor effect of anti-HER2_DIV is drastically blunted. One challenge associated with polypeptide therapies that target TfR for BBB access is reticulocyte safety. For this reason, LALA mutations are introduced in order to disengage FcγR-binding in TfR-expressing polypeptides. On the other hand, for applications in which effector function is required, the LALA mutations impose therapeutic limitations in therapies that require blood brain barrier access and effector function response.

[0480] The ability of Fc polypeptide dimer-antibody variable region fusion proteins to elicit Fab-mediated ADCC was evaluated in a HER2-positive breast cancer cell line. Target cells that express high HER2 levels (SK-BR-3) were used to evaluate HER2-mediated ADCC to ensure that effector function was retained. Target cells were plated target cells were plated at 10,000 cells/well, opsonized, incubated with NK cells at 25:1 effector:target cells ratio, and evaluated for cytotoxicity by LDH expression. Target cells were opsonized with (1) control IgG, (2) anti-HER2_DIV, (3) hIgG1 with a TfR-binding site and a HER2 Fab-binding site (HER2_DIV-35.23.1.1^{WT IgG}) and (4) HER2_DIV-35.23.1.1^{cisLALA}. Consistent with Fab-mediated ADCC that was previously observed with a TfR-binding polypeptide with cis configuration, ADCC was observed in HER2-positive breast cancer cell line SK-BR-3 with HER2_DIV-35.23.1.1^{cisLALA}, demonstrating that effector function was retained (FIG. 6).

### Example 6. Fc Polypeptide Dimer-Fab Fusion Proteins have Superior Anti-Tumor Potency in a HER2⁺ Xenograft Model with BT474 Cell Line

[0481] We next utilized a BT474 xenograft tumor model in SCID mice to examine in vivo anti-tumor efficacy of the combination of HER2_DIV-35.23.4^{cisLALA} and HER2_DII-35.23.4^{cisLALA} compared to the combination of anti-HER2-DIV and anti-HER2-DII. Specifically, HER2_DIV-35.23.4^{cisLALA} has a first heavy chain comprising SEQ ID NO:18, a second heavy chain comprising SEQ ID NO:27, and two light chains comprising SEQ ID NO:57. HER2_DII-35.23.4^{cisLALA} has a first heavy chain comprising SEQ ID NO:46, a second heavy chain comprising SEQ ID NO:55, and two light chains comprising SEQ ID NO:58. Anti-HER2_DIV has two heavy chains comprising SEQ ID NO:97 and two light chains comprising SEQ ID NO:57. Anti-HER2_DII has two heavy chains comprising SEQ ID NO:98 and two light chains comprising SEQ ID NO:58.

[0482] Tumor fragments derived from BT474 cells were implanted subcutaneously at the flank of SCID mice. When the tumor size has reached an average of 100 mm³, animals were treated twice a week for 4 weeks at 3, 10, or 20 mg/kg of each test article, and 40 mg/kg of control IgG as the control. Tumor volume was measured twice a week; animals were sacrificed when they have reached an experimental endpoint of 1000 mm³ or until 60 days of the study. As shown in FIG. 7A, at the medium dose 10 mg/kg, there is significantly higher tumor growth inhibition in the animals treated with ATV:HER2-DIV+ATV:HER2-DII (HER2_DIV-35.23.4^{cisLALA} and HER2_DII-35.23.4^{cisLALA}) compared to anti-HER2-DIV+anti-HER2-DII. A dose-response relationship using doses 3, 10, and 20 mg/kg of each test article shows that ATV:HER2-DIV+ATV:HER2-DII is more potent than anti-HER2-DIV+anti-HER2-DII (FIG. 7B). A cohort of animals were sacrificed 24h post 4^{th} dose. Tumors were harvested and lysates were used to determine pAKT and total AKT protein expression levels using a MSD phospho AKT (Ser473)/Total AKT Assay Whole Cell Lysate Kit as per manufacturer's protocol. Briefly, assay plate was blocked for 1h with manufacturer's blocking solution. Lysate supernatant samples and assay controls were incubated onto the plate for 1h. Detection antibody was subsequently added and the plate was read using an MSD plate reader. As expected, treatment of both anti-HER2-DIV+anti-HER2-DII and ATV:HER2-DIV+ATV:HER2-DII significantly reduced pAKT levels, which is consistent with the mechanism in which targeting against HER2 could abrogate the PI3K/Akt signaling pathway that is activated in HER2⁺ tumors (FIG. 7C).

### Example 7. Fc Polypeptide Dimer-Fab Fusion Proteins have Increased Brain Concentrations and Brain:Plasma Ratio Compared to Standard hIgG

[0483] To evaluate the plasma exposure and brain uptake of ATV:HER2-DIV (HER2_DIV-35.23.4^{cisLALA}) and ATV:HER2-DII (HER2_DII-35.23.4^{cisLALA}) molecules, TfR^{mu/hu} KI mice were treated with anti-HER2-DIV, anti-HER2-DII, ATV:HER2-DIV, and ATV:HER2-DII at 50 mg/kg on Day 0. Plasma samples were collected on Days 1, 2, 4, and 7, while brains were harvested on Days 1 and 7. Antibody concentrations by hIgG measurements in mouse plasma and brain samples were quantified using a sandwich ELISA (FIGS. 8A and 8B). Briefly, a 384-well MaxiSorp plate was coated overnight with a polyclonal donkey anti-human IgG capture antibody, specific for the Fc fragment. The respective dosing solutions were used as a standard for antibody quantification. Brain samples were homogenized in 1% NP40 lysis buffer. Standards, diluted plasma and brain lysates were added to the blocked plates for 2 hours at RT, followed by a 1-hour incubation with the detection antibody, an HRP-conjugated polyclonal goat anti-human IgG specific for the Fc fragment. The hIgG concentrations were determined using the standard curve.

[0484] Target-mediated drug disposition is expected with TfR-binding molecules since TfR is ubiquitously expressed in peripheral tissues. Indeed, the ability of ATV:HER2-DIV and ATV:HER2-DII to bind TfR enables these molecules to be transported across the blood brain barrier. Following 24h post dose at 50 mg/kg, the brain concentration was 33-42 nM for HER2-ATVs and about 4.5 nM for anti-HER2 molecules (FIG. 8B), while the brain to plasma ratio was about 10 fold higher for HER2-ATVs anti-HER2 antibodies (FIG. 8C). Taken together, these data support that these polypeptide dimer-Fab fusion proteins could have the effects of anti-HER2 antibodies but with addition BBB-penetrant features.

### Example 8. Characterization of Additional Fc Polypeptide Dimer-Fab Fusion Proteins

[0485] Additional Fc polypeptide dimer-antibody variable region fusion proteins were constructed using CH3C.35.23.4 in the first Fc polypeptide. The binding affinities of these anti-HER2 constructs for human TfR apical domain and the extracellular domain of HER2 were tested and compared to Fc polypeptide dimer-antibody variable region fusion proteins wherein the first Fc polypeptide comprised CH3C.35.23.1.1.

[0486] The affinities of Fc polypeptide dimer-antibody variable region fusion proteins for human TfR apical domain and HER2 ECD were determined by surface plasmon resonance using a Biacore™ 8K. Fc polypeptide dimer-antibody variable region fusion proteins were captured using a Human Fab Capture Kit (GE, #28-9583-25) on Biacore™ Series S CM5 sensor chips (GE, #29149604) for measurement of human TfR apical domain binding, or using a Human Fc capture Kit (GE, #29234600) for measurement of human HER2-ECD binding (ACROBiosystems, HE2-H5225). Serial 3-fold dilutions of each antigen were injected at a flow rate of 30 μL/min. The binding of the antigens to captured Fc polypeptide dimer-antibody variable region fusion proteins was monitored for 30 to 300 seconds and then their dissociation was monitored for 30-4,200 seconds in HBS-EP+ running buffer. Binding responses were corrected by subtracting the RU from a blank flow cell. A 1:1 Languir model of simultaneous fitting of kₒₙ and k_{off} was used for kinetics analysis.

[0487] As shown in Table 7 below, the 35.23.4 anti-HER2 constructs and the 35.23.1.1 anti-HER2 constructs all bound TfR (“WT_IgG” indicates that neither Fc polypeptide contains LALA modification; “cisLALA” indicates that the LALA mutations are present the Fc polypeptide that contains the mutations that create a TfR-binding site, but not on the other Fc polypeptide). An upward drift in the curve for HER2_DII-35.23.1.1^{cisLALA} likely caused an artifactual increase in the K_{D} value for this anti-HER2 construct. Furthermore, no difference in TfR affinity was observed as a result of the Fab domain in this assay format (i.e., where the Fc polypeptide was captured via anti-human Fab).

TABLE 7
Binding affinities for apical hTfR.

| Molecule | K_{D} (nM) |
|---|---|
| HER2_DIV-35.23.4^{WT}^{_{—}}^{IgG} | 498 |
| HER2_DIV-35.23.4^{cisLALA} | 458 |
| HER2_DII-35.23.4^{cisLALA} | 445 |
| HER2_DIV-35.23.1.1^{cisLALA} | 660 |
| HER2_DII-35.23.1.1^{cisLALA} | 534 |
| Anti-BACE-35.23.4^{WT}^{_{—}}^{IgG} | 439 |

[0488] As shown in Table 8 below, Fc polypeptide dimer-antibody variable region fusion proteins comprising anti-HER2 subdomain IV and subdomain II antibody variable regions bound to HER2-ECD with affinity (and kinetics) similar to anti-HER2_DIV (used as the reference standard).

TABLE 8
Binding affinities for HER2 ECD.

| Molecule | K_{D} (nM) |
|---|---|
| HER2_DIV-35.23.4^{WT}^{_{—}}^{IgG} | 2.0 |
| HER2_DIV-35.23.4^{cisLALA} | 1.4 |
| HER2_DII-35.23.4^{cisLALA} | 1.8 |
| HER2_DIV-35.23.1.1^{cisLALA} | 1.8 |
| HER2_DII-35.23.1.1^{cisLALA} | 2.1 |
| Anti-HER2_DIV | 2.1 |

### Example 9. HER2-Targeting Fabs Fused to Modified Fc Polypeptides that Target TfR

[0489] We generated human IgG1 anti-HER2 antibodies that bind HER2 domains I, II, and IV, which we refer to as anti-HER2-DI, anti-HER2-DII, and anti-HER2-DIV, respectively. The heavy chains Fd regions derived from these mAbs (VH+CH1) were cloned into expression vectors comprising a sequence encoding an Fc polypeptide engineered to bind to the human TfR (CH3C.35.23.4). The Fc polypeptide-encoding sequence also contained a “knob” (T366W) mutation to prevent homodimerization and to promote heterodimerization with an Fc polypeptide comprising “hole” (T366S/L368A/Y407V) mutations. Additionally, the modified Fc polypeptide sequence contained mutations L234A and L235A, which attenuate FcγR binding. The Fd region was also cloned into corresponding “hole” vectors comprising a sequence encoding an Fc polypeptide with hole mutations, but lacking both the TfR binding mutations and the L234A and L235A mutations.

[0490] The corresponding aforementioned knob and hole vectors were co-transfected to ExpiCHO or Expi293 cells along with the corresponding light chain vector in the ratio knob:hole:light chain of 1:1:2. The expressed protein was purified by Protein A chromatography followed by preparative size-exclusion chromatography (SEC) to isolate purified proteins, which we refer to as ATV:-HER2-DI (HER2_DI-35.23.4^{cisLALA}), ATV:-HER2-DII (HER2_DII-35.23.4^{cisLALA}), and ATV:-HER2-DIV (HER2_DIV-35.23.4^{cisLALA}) We also made ATV:ctrl, which contains the same modified Fc polypeptide as HER2_DI/DII/DIV-35.23.4^{cisLALA} but has Fabs that bind to an irrelevant antigen (Abeta) that is not expressed on cells of interest in subsequent studies.

[0491] Specifically, HER2_D-35.23.4^{cisLALA} has a first heavy chain comprising SEQ TD NO:275, a second heavy chain comprising SEQ ID NO:290, and two light chains comprising SEQ ID NO:293. HER2_DII-35.23.4^{cisLALA} has a first heavy chain comprising SEQ ID NO:46, a second heavy chain comprising SEQ ID NO:55, and two light chains comprising SEQ ID NO:58. HER2_DIV-35.23.4^{cisLALA} has a first heavy chain comprising SEQ ID NO:18, a second heavy chain comprising SEQ ID NO:27, and two light chains comprising SEQ ID NO:57.

[0492] Further, anti-HER2-DI, anti-HER2-DII, anti-HER2-DIV, and anti-TfR mAb containing unmodified human IgG1 constant regions were generated analogously.

### Example 10. Measuring the Affinities of HER2- and TfR-Binding Molecules

[0493] Affinities of mAbs and TfR-binding Fc polypeptides were measured by SPR using a Biacore T200 or a Biacore 8K. Biacore™ Series S CM5 sensor chips were immobilized with monoclonal mouse anti-human IgG (Fc) antibody for HER2 affinity measurements or mouse anti-human Fab for TfR affinity measurements (human antibody or Fab capture kit from GE Healthcare). Serial 3-fold dilutions of analyte (recombinant HER2 extracellular domain or recombinant TfR apical domain) were injected at a flow rate of 30 μL/min. Each sample was analyzed using a 3-minute association and a 10-minute dissociation. After each injection, the chip was regenerated using 3 M MgCl₂. Binding response was corrected by subtracting the RU from a flow cell capturing an irrelevant IgG at similar density. A 1:1 Languir model of simultaneous fitting of kₒₙ and k_{off} was used for kinetics analysis.

TABLE 10
SPR data.

| | HER2 kₒₙ | HER2 k_{off} | HER2 K_{D} | huTfR Steady- |
|---|---|---|---|---|
| Molecule | (M⁻¹ s⁻¹) | (s⁻¹) | (M) | State Affinity (M) |
| Anti-HER2-DI | 1.54E+05 | 1.01E−03 | 6.5E−09 | NB |
| Anti-HER2-DII | 1.75E+05 | 2.28E−04 | 1.3E−09 | NB |
| Anti-HER2-DIV | 2.44E+05 | 1.90E−04 | 7.8E−10 | NB |
| ATV:HER2-DI | 1.39E+05 | 1.05E−03 | 7.5E−09 | 3.7E−07 |
| ATV:HER2-DII | 1.66E+05 | 7.75E−04 | 4.7E−09 | 4.5E−07 |
| ATV:HER2-DIV | 2.42E+05 | 1.67E−04 | 6.9E−10 | 5.0E−07 |

NB = no binding

### Example 11. Co-Targeting of TfR and HER2-DIV

[0494] Many tumor cells and tumor cell lines, such as BT474 and OE19, express both HER2 and TfR. While it is well established that antibodies targeting HER2-DIV are capable of inhibiting tumor cell growth and reducing tumor cell viability in some HER2⁺ cell lines, we sought to understand whether co-targeting HER2-DIV and TfR would lead to enhanced cell killing.

[0495] We first compared HER2_DIV-35.23.4^{cisLALA} to anti-HER2-DIV and ATV:ctrl in a growth inhibition assay with a HER2⁺ tumor cell line BT474, which is sensitive to anti-HER2 therapies. BT474 cells were plated overnight at 10,000 cells/well in a 96-well plate, treated with 60 μL of 1:3 serial dilution of molecules of interest beginning at 166 nM (25,000 ng/mL). Culture media (RPMI) and drugs were replenished on Day 3. On Day 6, cell growth was determined using 5 μL of WST-1 reagent (Sigma Aldrich) in 50 μL of growth media. The plate was incubated for 4 hours in the presence of WST-1 reagent, and absorbance was determined at 440 nm. The percent of growth inhibition/proliferation was calculated based on A440 nM and was normalized to the untreated control. Anti-HER2-DIV reduced BT474 cell viability relative to the control with an IC50 of 1.1 nM and a maximum inhibition of 64%. Conversely, ATV:ctrl, which does not bind to any cell antigen, did not have any effect on cell viability, while HER2_DIV-35.23.4^{cisLALA} (ATV:HER2-DIV) showed similar growth inhibition compared to anti-HER2-DIV (FIG. 9A).

[0496] Next, we compared HER2_DIV-35.23.4^{cisLALA} to anti-HER2-DIV and ATV:ctrl with another HER2⁺ cancer cell line OE19 that is resistant to anti-HER2 therapies. Unlike BT474, in which there was no difference between the effects of HER2_DIV-35.23.4^{cisLALA} and anti-HER2-DIV, OE19 cell line had a maximum inhibition of 75% upon HER2_DIV-35.23.4^{cisLALA} treatment while it was not responsive to anti-HER2-DIV (FIG. 9B). These results suggest that co-targeting of HER2-DIV and TfR results in enhanced cell growth inhibition in an anti-HER2-resistant cell line as compared to targeting HER2-DIV alone.

### Example 12. Co-Targeting of TfR and HER2-DII

[0497] We next determined whether co-targeting HER2-DII and TfR using anti-HER2-DII Fabs fused to TfR-binding Fc polypeptides (ATV:HER2-DII; HER2_DII-35.23.4^{cisLALA}) could enhance cell growth inhibition against BT474 and OE19 tumor cells. Using the same growth inhibition assay described previously, we determined that, in contrast to anti-HER2-DIV treatment, anti-HER2-DII treatment has no impact on the viability of BT474 and OE19 cells (FIGS. 10A and 10B). Similarly, cells treated with ATV:ctrl or anti-TfR alone, or when combined with anti-HER2-DII, did not inhibit BT474 cell growth. In contrast, treatment of BT474 and OE19 cells with HER2_DII-35.23.4^{cisLALA} led to reduced cell viability with an IC50 of 1.17 nM and 0.725 nM, and max inhibition of 51.2% and 77.5%, respectively (FIGS. 10A and 10B). Since neither anti-TfR alone nor the combination of anti-TfR and anti-HER2-DII had any impact on BT474 cell viability (FIG. 10A), we conclude that binding to both TfR and HER2-DII with the same molecule (HER2_DII-35.23.4^{cisLALA}) was required to achieve cell killing in this context. These results provide support that the simultaneous binding, and likely crosslinking, of TfR and HER2-DII by a single molecule can potentiate the growth inhibition of HER2⁺ cancer cell lines.

### Example 13. Co-Targeting of TfR and HER2-DI

[0498] To further determine if co-targeting TfR and the HER2 protein would apply more broadly to other domains of HER2, we also targeted HER2-DI by using anti-HER2-DI and HER2_DI-35.23.4^{cisLALA} (ATV:HER2-DI) in a growth inhibition assay with OE19 cell line. Similar to HER2-DII, OE19 cells did not respond to anti-HER2-DI but had maximum inhibition of 84% upon HER2_DI-35.23.4^{cisLALA} treatment (FIG. 11). This data is consistent with our hypothesis that the simultaneous binding, and likely crosslinking, of TfR and HER2-DI by a single molecule can potentiate growth inhibition of HER2⁺ cancer cells. Taken together, tumor growth inhibition may be potentiated in a HER2 subdomain target upon simultaneous TfR engagement, even when the domain is not normally responsive when targeted alone.

### Example 14. Combination of ATV:HER2-DIV and ATV:HER2-DII

[0499] We next used the growth inhibition assay described previously to evaluate the effects of the combination of ATV:HER2-DIV (HER2_DIV-35.23.4^{cisLALA}) and ATV:HER2-DII (HER2_DII-35.23.4^{cisLALA}) versus the combination of anti-HER2-DIV and anti-HER2-DII in BT474 cells. Indeed, we observed approximately a 2.5-fold increase in growth inhibition potency upon treatment of the combination of ATV:HER2-DIV and ATV:HER2-DII compared to the combination of anti-HER2_DIV and anti-HER2_DII (FIG. 12).

[0500] We also tested whether the combination ATV:HER2-DIV (HER2_DIV-35.23.1.1^{cisLALA}) and ATV:HER2-DII (HER2_DII-35.23.1.1^{cisLALA}) could overcome tumor resistance in a neuregulin 1-induced resistance model. The Fc polypeptide engineered to bind to the human TfR used here is CH3C.35.23.1.1. Specifically, HER2_DIV-35.23.1.1^{cisLALA} has a first heavy chain comprising SEQ ID NO:2, a second heavy chain comprising SEQ ID NO:27, and two light chains comprising SEQ ID NO:57. HER2_DII-35.23.1.1^{cisLALA} has a first heavy chain comprising SEQ ID NO:30, a second heavy chain comprising SEQ ID NO:55, and two light chains comprising SEQ ID NO:58.

[0501] Neuregulin 1 (NRG-1) is a ligand for HER3 that is enriched in the brain microenvironment that activates HER3 signaling pathways and initiates HER2-HER3 dimerization. This in turn leads to activation of the PI3K/AKT pathway and renders tumor cells resistant to anti-HER2-DIV treatment. In the presence of NRG1 (50 ng/mL), BT474 breast cancer cells were indeed resistant to anti-HER2-DIV, which showed cell growth inhibition of only around 15% (FIG. 4). Cross-linking HER2-DIV and TfR with HER2_DIV-35.23.1.1^{cisLALA} (ATV:HER2-DIV) led to enhanced growth inhibition of up to around 40% (FIG. 4), but this was still attenuated relative to cells not treated with NRG-1 (inhibition up to about 70%, FIGS. 9A and 9B). Nonetheless, these results demonstrate that enhancement of tumor cell killing by cross-linking HER2 and TfR can be achieved using molecules targeting HER2-DIV, in addition to those targeting HER2-DII as demonstrated previously.

[0502] Co-treatment of NRG1-treated BT474 cells with a combination of molecules targeting both HER2-DIV and HER2-DII led to >80% cell killing. As expected, the effect was enhanced with HER2_DIV-35.23.1.1^{cisLALA}+HER2_DII-35.23.1.1^{cisLALA} relative to anti-HER2-DIV+anti-HER2-DII (FIG. 4), again presumably due to cross-linking of HER2 and TfR.

### Example 15. Cell Surface TfR Expression Following Anti-HER2/TfR Treatment

[0503] We tested whether treatment of ATV:HER2-DII (HER2_DII-35.23.4^{cisLALA}) and/or ATV:HER2-DIV (HER2_DIV-35.23.4^{cisLALA}) could lead to increased TfR internalization via the measurement of surface TfR protein expression by flow cytometry. BT474 cells were incubated for 30 minutes at 37° C. with test articles or controls, as indicated in FIGS. 13A-13C, including: PBS, ATV:ctrl, anti-HER2-DIV and/or anti-HER2-DII, the combination of ATV:ctrl and anti-HER2-DIV or anti-HER2-DII, and ATV:HER2-DIV and/or ATV:HER2-DII. Following incubation, cells were washed 2× with cold PBS, stained with anti-TfR (CD71) antibody conjugated with APC (Fisher Scientific) for 20 min on ice, and evaluated for the median fluorescence intensity (MFI) by flow cytometry using a BD Canto II. Results were analyzed by the FlowJo Software.

[0504] BT474 cells that were treated with greater than around 100 pM ATV:HER2-DIV and/or ATV:HER2-DII had significantly reduced surface TfR expression following 30 min incubation at 37° C. (FIGS. 13A-13C), whereas anti-HER2-DII or anti-HER2-DIV treatment had no impact on TfR expression. Also of note, ATV:ctrl, which binds TfR but not HER2, had no impact on TfR expression, suggesting that HER2-TfR cross-linking contributes to receptor depletion. This mechanism may contribute toward the enhanced cell killing observed for TfR-HER2 crosslinking molecules (see previous Examples).

### Example 16. Modified Fc Polypeptides that Bind to TfR

[0505] This example describes modifications to Fc polypeptides to confer TfR binding and transport across the BBB.

[0506] Unless otherwise indicated, the positions of amino acid residues in this section are numbered based on EU index numbering for a human IgG1 wild-type Fc region.

### Generation and Characterization of Fc Polypeptides Comprising Modifications at Positions 384, 386, 387, 388, 389, 390, 413, 416, and 421 (CH3C Clones)

[0507] Yeast libraries containing Fc regions having modifications introduced into positions including amino acid positions 384, 386, 387, 388, 389, 390, 413, 416, and 421 were generated as described below. Illustrative clones that bind to TfR are shown in Tables 5 and 6.

[0508] After an additional two rounds of sorting, single clones were sequenced and four unique sequences were identified. These sequences had a conserved Trp at position 388, and all had an aromatic residue (i.e., Trp, Tyr, or His) at position 421. There was a great deal of diversity at other positions.

[0509] The four clones selected from the library were expressed as Fc fusions to Fab fragments in CHO or 293 cells, and purified by Protein A and size-exclusion chromatography, and then screened for binding to human TfR in the presence or absence of holo-Tf by ELISA. The clones all bound to human TfR and the binding was not affected by the addition of excess (5 μM) holo-Tf Clones were also tested for binding to 293F cells, which endogenously express human TfR. The clones bound to 293F cells, although the overall binding was substantially weaker than the high-affinity positive control.

[0510] Next, it was tested whether clones could internalize in TfR-expressing cells using clone CH3C.3 as a test clone. Adherent HEK 293 cells were grown in 96-well plates to about 80% confluence, media was removed, and samples were added at 1 μM concentrations: clone CH3C.3, anti-TfR benchmark positive control antibody (Ab204), anti-BACE1 benchmark negative control antibody (Ab107), and human IgG isotype control (obtained from Jackson Immunoresearch). The cells were incubated at 37° C. and 8% CO₂ concentration for 30 minutes, then washed, permeabilized with 0.1% Triton™ X-100, and stained with anti-human-IgG-Alexa Fluor® 488 secondary antibody. After additional washing, the cells were imaged under a high content fluorescence microscope (i.e., an Opera Phenix™ system), and the number of puncta per cell was quantified. At 1 μM, clone CH3C.3 showed a similar propensity for internalization to the positive anti-TfR control, while the negative controls showed no internalization.

### Further Engineering of Clones

[0511] Additional libraries were generated to improve the affinity of the initial hits against human TfR using a soft randomization approach, wherein DNA oligos were generated to introduce soft mutagenesis based on each of the original four hits. Additional clones were identified that bound TfR and were selected. The selected clones fell into two general sequence groups. Group 1 clones (i.e., clones CH3C.18, CH3C.21, CH3C.25, and CH3C.34) had a semi-conserved Leu at position 384, a Leu or His at position 386, a conserved and a semi-conserved Val at positions 387 and 389, respectively, and a semi-conserved P-T-W motif at positions 413, 416, and 421, respectively. Group 2 clones had a conserved Tyr at position 384, the motif TXWSX at positions 386-390, and the conserved motif S/T-E-F at positions 413, 416, and 421, respectively. Clones CH3C.18 and CH3C.35 were used in additional studies as representative members of each sequence group.

### Epitope Mapping

[0512] To determine whether the engineered Fc regions bound to the apical domain of TfR, TfR apical domain was expressed on the surface of phage. To properly fold and display the apical domain, one of the loops had to be truncated and the sequence needed to be circularly permuted. Clones CH3C.18 and CH3C.35 were coated on ELISA plates and a phage ELISA protocol was followed. Briefly, after washing and blocking with 1% PBSA, dilutions of phage displaying were added and incubated at room temperature for 1 hour. The plates were subsequently washed and anti-M13-HRP was added, and after additional washing the plates were developed with TMB substrate and quenched with 2N H₂SO₄. Both clones CH3C.18 and CH3C.35 bound to the apical domain in this assay.

### Paratope Mapping

[0513] To understand which residues in the Fe domain were most important for TfR binding, a series of mutant clone CH3C.18 and clone CH3C.35 Fc regions was created in which each mutant had a single position in the TfR binding register mutated back to wild-type. The resulting variants were expressed recombinantly as Fab-Fc fusions and tested for binding to human or cyno TfR. For clone CH3C.35, positions 388 and 421 were important for binding; reversion of either of these to wild-type completely ablated binding to human TfR.

### Binding Characterization of Maturation Clones

[0514] Binding ELISAs were conducted with purified Fab-Fc fusion variants with human or cyno TfR coated on the plate, as described above. The variants from the clone CH3C.18 maturation library, clone CH3C.3.2-1, clone CH3C.3.2-5, and clone CH3C.3.2-19, bound human and cyno TfR with approximately equivalent EC₅₀ values, whereas the parent clones CH3C.18 and CH3C.35 had greater than 10-fold better binding to human versus cyno TfR.

[0515] Next, it was tested whether the modified Fc polypeptides internalized in human and monkey cells. Using the protocol described above, internalization in human HEK 293 cells and rhesus LLC-MIK2 cells was tested. The variants that similarly bound human and cyno TfR, clones CH3C.3.2-5 and CH3C.3.2-19, had significantly improved internalization in LLC-MIK2 cells as compared with clone CH3C.35.

### Additional Engineering of Clones

[0516] Additional engineering to further affinity mature clones CH3C.18 and CH3C.35 involved adding additional mutations to the positions that enhanced binding through direct interactions, second-shell interactions, or structure stabilization. This was achieved via generation and selection from an “NNK walk” or “NNK patch” library. The NNK walk library involved making one-by-one NNK mutations of residues that are near to the paratope. By looking at the structure of Fc bound to FcγRI (PDB ID: 4W40), 44 residues near the original modification positions were identified as candidates for interrogation. Specifically, the following residues were targeted for NNK mutagenesis: K248, R255, Q342, R344, E345, Q347, T359, K360, N361, Q362, S364, K370, E380, E382, S383, G385, Y391, K392, T393, D399, S400, D401, S403, K409, L410, T411, V412, K414, S415, Q418, Q419, G420, V422, F423, S424, S426, Q438, S440, S442, L443, S444, P4458, G446, and K447. The 44 single point NNK libraries were generated using Kunkel mutagenesis, and the products were pooled and introduced to yeast via electroporation, as described above for other yeast libraries.

[0517] The combination of these mini-libraries (each of which had one position mutated, resulting in 20 variants) generated a small library that was selected using yeast surface display for any positions that lead to higher affinity binding. Selections were performed as described above, using TfR apical domain proteins. After three rounds of sorting, clones from the enriched yeast library were sequenced, and several “hot-spot” positions were identified where certain point mutations significantly improved the binding to apical domain proteins. For clone CH3C.35, these mutations included E380 (mutated to Trp, Tyr, Leu, or Gln) and S415 (mutated to Glu). The sequences of the clone CH3C.35 single and combination mutants are set forth in SEQ ID NOs:177 and 185-195. For clone CH3C.18, these mutations included E380 (mutated to Trp, Tyr, or Leu) and K392 (mutated to Gln, Phe, or His). The sequences of the clone CH3C.18 single mutants are set forth in SEQ ID NOs:181-186.

### Additional Maturation Libraries to Improve Clone CH3C.35 Affinity

[0518] An additional library to identify combinations of mutations from the NNK walk library, while adding several additional positions on the periphery of these, was generated as described for previous yeast libraries. In this library, the YxTEWSS (SEQ ID NO:196) and TxxExxxxF (SEQ ID NO:197) motifs were kept constant, and six positions were completely randomized: E380, K392, K414, S415, S424, and S426. Positions E380 and S415 were included because they were “hot spots” in the NNK walk library. Positions K392, S424, and S426 were included because they make up part of the core that may position the binding region, while K414 was selected due to its adjacency to position 415.

[0519] This library was sorted, as previously described, with the cyno TfR apical domain only. The enriched pool was sequenced after five rounds, and the sequences of the modified regions of the identified unique clones are set forth in SEQ ID NOs:198-215.

[0520] The next libraries were designed to further explore acceptable diversity in the main binding paratope. Each of the original positions (384, 386, 387, 388, 389, 390, 413, 416, and 421) plus the two hot spots (380 and 415) were individually randomized with NNK codons to generate a series of single-position saturation mutagenesis libraries on yeast. In addition, each position was individually reverted to the wild-type residue, and these individual clones were displayed on yeast. It was noted that positions 380, 389, 390, and 415 were the only positions that retained substantial binding to TfR upon reversion to the wild-type residue (some residual but greatly diminished binding was observed for reversion of 413 to wild-type).

[0521] The single-position NNK libraries were sorted for three rounds against the human TfR apical domain to collect the top ˜5% of binders, and then at least 16 clones were sequenced from each library. The results indicate what amino acids at each position can be tolerated without significantly reducing binding to human TfR, in the context of clone CH3C.35. A summary is below:

### Position 380: Trp, Leu, or Glu;

### Position 384: Tyr or Phe;

[0522] Position 386: Thr only;
Position 387: Glu only;
Position 388: Trp only;
Position 389: Ser, Ala, or Val (although the wild type Asn residue seems to retain some binding, it did not appear following library sorting);

### Position 390: Ser or Asn;

### Position 413: Thr or Ser;

### Position 415: Glu or Ser;

[0523] Position 416: Glu only; and
Position 421: Phe only.

[0524] The above residues, when substituted into clone CH3C.35 as single changes or in combinations, represent paratope diversity that retains binding to TfR apical domain. Clones having mutations at these positions include those shown in Table 6, and the sequences of the CH3 domains of these clones are set forth in SEQ ID NOs:177-180, 192-195, 214, and 216-249.

### Example 17. Methods

### Generation of Phage-Display Libraries

[0525] A DNA template coding for the wild-type human Fc sequence was synthesized and incorporated into a phagemid vector. The phagemid vector contained an ompA or pelB leader sequence, the Fc insert fused to c-Myc and 6×His epitope tags, and an amber stop codon followed by M13 coat protein pIII.

[0526] Primers containing “NNK” tricodons at the desired positions for modifications were generated, where N is any DNA base (i.e., A, C, G, or T) and K is either G or T. Alternatively, primers for “soft” randomization were used, where a mix of bases corresponding to 70% wild-type base and 10% of each of the other three bases was used for each randomization position. Libraries were generated by performing PCR amplification of fragments of the Fc region corresponding to regions of randomization and then assembled using end primers containing SfiI restriction sites, then digested with SfiI and ligated into the phagemid vectors. Alternatively, the primers were used to conduct Kunkel mutagenesis. The ligated products or Kunkel products were transformed into electrocompetent E. coli cells of strain TG1 (obtained from Lucigen®). The E. coli cells were infected with M13K07 helper phage after recovery and grown overnight, after which library phage were precipitated with 5% PEG/NaCl, resuspended in 15% glycerol in PBS, and frozen until use. Typical library sizes ranged from about 10⁹ to about 10¹¹ transformants. Fc-dimers were displayed on phage via pairing between pIII-fused Fc and soluble Fc not attached to pIII (the latter being generated due to the amber stop codon before pIII).

### Generation of Yeast-Display Libraries

[0527] A DNA template coding for the wild-type human Fc sequence was synthesized and incorporated into a yeast display vector. For CH2 and CH3 libraries, the Fc polypeptides were displayed on the Aga2p cell wall protein. Both vectors contained prepro leader peptides with a Kex2 cleavage sequence, and a c-Myc epitope tag fused to the terminus of the Fc.

[0528] Yeast display libraries were assembled using methods similar to those described for the phage libraries, except that amplification of fragments was performed with primers containing homologous ends for the vector. Freshly prepared electrocompetent yeast (i.e., strain EBY100) were electroporated with linearized vector and assembled library inserts. Electroporation methods will be known to one of skill in the art. After recovery in selective SD-CAA media, the yeast were grown to confluence and split twice, then induced for protein expression by transferring to SG-CAA media. Typical library sizes ranged from about 10⁷ to about 10⁹ transformants. Fc-dimers were formed by pairing of adjacently displayed Fc monomers.

### General Methods for Phage Selection

[0529] Phage methods were adapted from Phage Display: A Laboratory Manual (Barbas, 2001). Additional protocol details can be obtained from this reference.

### Plate Sorting Methods

[0530] Human TfR target was coated on MaxiSorp® microtiter plates (typically 200 μL at 1-10 μg/mL in PBS) overnight at 4° C. All binding was done at room temperature unless otherwise specified. The phage libraries were added into each well and incubated overnight for binding. Microtiter wells were washed extensively with PBS containing 0.05% Tween® 20 (PBST) and bound phage were eluted by incubating the wells with acid (typically 50 mM HCl with 500 mM KCl, or 100 mM glycine, pH 2.7) for 30 minutes. Eluted phage were neutralized with 1 M Tris (pH 8) and amplified using TG1 cells and M13/KO7 helper phage and grown overnight at 37° C. in 2YT media containing 50 μg/mL carbenacillin and 50 μg/mL Kanamycin. The titers of phage eluted from a target-containing well were compared to titers of phage recovered from a non-target-containing well to assess enrichment. Selection stringency was increased by subsequently decreasing the incubation time during binding and increasing washing time and number of washes.

### Bead Sorting Methods

[0531] Antigen was biotinylated through free amines using NHS-PEG4-Biotin (obtained from Pierce™). For biotinylation reactions, a 3- to 5-fold molar excess of biotin reagent was used in PBS. Reactions were quenched with Tris followed by extensive dialysis in PBS. The biotinylated antigen was immobilized on streptavidin-coated magnetic beads, (i.e., M280-streptavidin beads obtained Thermo Fisher). The phage display libraries were incubated with the antigen-coated beads at room temperature for 1 hour. The unbound phage were then removed and beads were washed with PBST. The bound phage were eluted by incubating with 50 mM HCl containing 500 mM KCl (or 0.1 M glycine, pH 2.7) for 30 minutes, and then neutralized and propagated as described above for plate sorting.

[0532] After three to five rounds of panning, single clones were screened by either expressing Fc on phage or solubly in the E. coli periplasm. Such expression methods will be known to one of skill in the art. Individual phage supernatants or periplasmic extracts were exposed to blocked ELISA plates coated with antigen or a negative control and were subsequently detected using HRP-conjugated goat anti-Fc (obtained from Jackson Immunoresearch) for periplasmic extracts or anti-M13 (GE Healthcare) for phage, and then developed with TMB reagent (obtained from Thermo Fisher). Wells with OD₄₅₀ values greater than around 5-fold over background were considered positive clones and sequenced, after which some clones were expressed either as a soluble Fc fragment or fused to Fab fragments.

### General Methods for Yeast Selection

### Bead Sorting (Magnetic-Assisted Cell Sorting (MACS)) Methods

[0533] MACS and FACS selections were performed similarly to as described in Ackerman, et al. 2009 Biotechnol. Prog. 25(3), 774. Streptavidin magnetic beads (e.g., M-280 streptavidin beads from Thermo Fisher) were labeled with biotinylated antigen and incubated with yeast (typically 5-10× library diversity). Unbound yeast were removed, the beads were washed, and bound yeast were grown in selective media and induced for subsequent rounds of selection.

### Fluorescence-Activated Cell Sorting (FACS) Methods

[0534] Yeast were labeled with anti-c-Myc antibody to monitor expression and biotinylated antigen (concentration varied depending on the sorting round). In some experiments, the antigen was pre-mixed with streptavidin-Alexa Fluor® 647 in order to enhance the avidity of the interaction. In other experiments, the biotinylated antigen was detected after binding and washing with streptavidin-Alexa Fluor® 647. Singlet yeast with binding were sorted using a FACS Aria III cell sorter. The sorted yeast were grown in selective media then induced for subsequent selection rounds.

[0535] After an enriched yeast population was achieved, yeast were plated on SD-CAA agar plates and single colonies were grown and induced for expression, then labeled as described above to determine their propensity to bind to the target. Positive single clones were subsequently sequenced for binding antigen, after which some clones were expressed either as a soluble Fc fragment or as fused to Fab fragments.

### General Methods for Screening

### Screening by ELISA

[0536] Clones were selected from panning outputs and grown in individual wells of 96-well deep-well plates. The clones were either induced for periplasmic expression using autoinduction media (obtained from EMD Millipore) or infected with helper phage for phage-display of the individual Fc variants on phage. The cultures were grown overnight and spun to pellet E. coli. For phage ELISA, phage containing supernatant was used directly. For periplasmic expression, pellets were resuspended in 20% sucrose, followed by dilution at 4:1 with water, and shaken at 4° C. for 1 hour. Plates were spun to pellet the solids and supernatant was used in the ELISA.

[0537] ELISA plates were coated with antigen, typically at 0.5 mg/mL overnight, then blocked with 1% BSA before addition of phage or periplasmic extracts. After a 1-hour incubation and washing off unbound protein, HRP-conjugated secondary antibody was added (i.e., anti-Fc or anti-M13 for soluble Fc or phage-displayed Fc, respectively) and incubated for 30 minutes. The plates were washed again, and then developed with TMB reagent and quenched with 2N sulfuric acid. Absorbance at 450 nm was quantified using a plate reader (BioTek®) and binding curves were plotted using Prism software where applicable. Absorbance signal for tested clones was compared to negative control (phage or paraplasmic extract lacking Fc). In some assays, soluble transferrin or other competitor was added during the binding step, typically at significant molar excess (greater than 10-fold excess).

### Screening by Flow Cytometry

[0538] Fc variant polypeptides (expressed either on phage, in periplasmic extracts, or solubly as fusions to Fab fragments) were added to cells in 96-well V-bottom plates (about 100,000 cells per well in PBS+1% BSA (PBSA)), and incubated at 4° C. for 1 hour. The plates were subsequently spun and the media was removed, and then the cells were washed once with PBSA. The cells were resuspended in PBSA containing secondary antibody (typically goat anti-human-IgG-Alexa Fluor® 647 (obtained from Thermo Fisher)). After 30 minutes, the plates were spun and the media was removed, the cells were washed 1-2 times with PBSA, and then the plates were read on a flow cytometer (i.e., a FACSCanto™ II flow cytometer). Median fluorescence values were calculated for each condition using FlowJo software and binding curves were plotted with Prism software.

### Example 18. Construction of CH3C.18 Variants

[0539] This example describes the construction of a library of CH3C.18 variants.

[0540] Single clones were isolated, and grown overnight in SG-CAA media supplemented with 0.2% glucose overnight to induce surface expression of CH3C.18 variants. For each clone, two million cells were washed three times in PBS+0.5% BSA at pH 7.4. Cells were stained with biotinylated target, 250 nM human TfR, 250 nM cyno TfR, or 250 nM of an unrelated biotinylated protein for 1 hour at 4° C. with shaking, then washed twice with the same buffer. Cells were stained with nuetravidin-Alexafluor647 (AF647) for 30 minutes at 4° C., then washed twice again. Expression was measured using anti-c-myc antibody with anti-chicken-Alexfluor488 (AF488) secondary antibody. Cells were resuspended, and median fluorescence intensity (MFI) of AF647 and AF488 was measured on a BD FACS CantoII. MFI was calculated for the TfR-binding population for each population and plotted with human TfR, cyno TfR, or control binding.

[0541] Table 9 shows the library of CH3C.18 variants. Each row represents a variant that contains the indicated amino acid substitutions at each position and the amino acids at the rest of the positions are the same as those in CH3C.18. The positions shown in Table 9 are numbered according to the EU numbering scheme.

TABLE 9
CH3C.18 Variants

| Position | 384 | 386 | 387 | 389 | 390 | 391 | 413 | 416 | 421 |
|---|---|---|---|---|---|---|---|---|---|
| Wild-type Fc | N | Q | P | N | N | Y | D | R | N |
| CH3C.4 (CH3C.18.1) | V | T | P | A | L | Y | L | E | W |
| CH3C.2 (CH3C.18.2) | Y | T | V | S | H | Y | S | E | Y |
| CH3C.3 (CH3C.18.3) | Y | T | E | S | Q | Y | E | D | H |
| CH3C.1 (CH3C.18.4) | L | L | V | V | G | Y | A | T | W |
| CH3C.18 (CH3C.18.1.18) | L | H | V | A | V | Y | P | T | W |
| CH3C.3.1-3 (CH3C.18.3.1-3) | L | H | V | V | A | T | P | T | W |
| CH3C.3.1-9 (CH3C.18.3.1-9) | L | P | V | V | H | T | P | T | W |
| CH3C.3.2-1 (CH3C.18.3.2-1) | L | H | V | V | N | F | P | T | W |
| CH3C.3.2-5 (CH3C.18.3.2-5) | L | H | V | V | D | Q | P | T | W |
| CH3C.3.2-19 (CH3C.18.3.2-19) | L | H | V | V | N | Q | P | T | W |
| CH3C.3.4-1 (CH3C.18.3.4-1) | W | F | V | S | T | T | P | N | F |
| CH3C.3.4-19 (CH3C.18.3.4-19) | W | H | V | S | T | T | P | N | Y |
| CH3C.3.2-3 (CH3C.18.3.2-3) | L | H | V | V | E | Q | P | T | W |
| CH3C.3.2-14 (CH3C.18.3.2-14) | L | H | V | V | G | V | P | T | W |
| CH3C.3.2-24 (CH3C.18.3.2-24) | L | H | V | V | H | T | P | T | W |
| CH3C.3.4-26 (CH3C.18.3.4-26) | W | T | V | G | T | Y | P | N | Y |
| CH3C.3.2-17 (CH3C.18.3.2-17) | L | H | V | V | G | T | P | T | W |

[0542] It is understood that the examples and embodiments described herein are for illustrative purposes only and that various modifications or changes in light thereof will be suggested to persons skilled in the art and are to be included within the spirit and purview of this application and scope of the appended claims. The sequences of the sequence accession numbers cited herein are hereby incorporated by reference.

[0543] Unless otherwise defined, all technical and scientific terms used herein have the same meaning as commonly understood by one of ordinary skill in the art to which this disclosure belongs.

[0544] The disclosure illustratively described herein may suitably be practiced in the absence of any element or elements, limitation or limitations, not specifically disclosed herein. Thus, for example, the terms “comprising,” “including,” “containing,” etc. shall be read expansively and without limitation. Additionally, the terms and expressions employed herein have been used as terms of description and not of limitation, and there is no intention in the use of such terms and expressions of excluding any equivalents of the features shown and described or portions thereof, but it is recognized that various modifications are possible within the scope of the disclosure claimed.

[0545] The amino acid substitutions for each clone described in the Tables (e.g., Table 6) dictate the amino acid substitutions at the register positions of that clone over the amino acids found in the sequence set forth in the Sequence Listing, in case of discrepancy.

[0546] All publications, patent applications, patents, and other references mentioned herein are expressly incorporated by reference in their entirety, to the same extent as if each were incorporated by reference individually. In case of conflict, the present specification, including definitions, will control.

TABLE 5
CH3C Register Positions and Mutations

| Clone | | | | | | | | | | | | | | | | | | | |
|---|---|---|---|---|---|---|---|---|---|---|---|---|---|---|---|---|---|---|---|
| name | Group | 384 | 385 | 386 | 387 | 388 | 389 | 390 | 391 | . . . | 413 | 414 | 415 | 416 | 417 | 418 | 419 | 420 | 421 |
| Wild-type | n/a | N | G | Q | P | E | N | N | Y | . . . | D | K | S | R | W | Q | Q | G | N |
| 1 | | L | G | L | V | W | V | G | Y | . . . | A | K | S | T | W | Q | Q | G | W |
| 2 | | Y | G | T | V | W | S | H | Y | . . . | S | K | S | E | W | Q | Q | G | Y |
| 3 | | Y | G | T | E | W | S | Q | Y | . . . | E | K | S | D | W | Q | Q | G | H |
| 4 | | V | G | T | P | W | A | L | Y | . . . | L | K | S | E | W | Q | Q | G | W |
| 17 | 2 | Y | G | T | V | W | S | K | Y | . . . | S | K | S | E | W | Q | Q | G | F |
| 18 | 1 | L | G | H | V | W | A | V | Y | . . . | P | K | S | T | W | Q | Q | G | W |
| 21 | 1 | L | G | L | V | W | V | G | Y | . . . | P | K | S | T | W | Q | Q | G | W |
| 25 | 1 | M | G | H | V | W | V | G | Y | . . . | D | K | S | T | W | Q | Q | G | W |
| 34 | 1 | L | G | L | V | W | V | F | S | . . . | P | K | S | T | W | Q | Q | G | W |
| 35 | 2 | Y | G | T | E | W | S | S | Y | . . . | T | K | S | E | W | Q | Q | G | F |
| 44 | 2 | Y | G | T | E | W | S | N | Y | . . . | S | K | S | E | W | Q | Q | G | F |
| 51 | 1/2 | L | G | H | V | W | V | G | Y | . . . | S | K | S | E | W | Q | Q | G | W |
| 3.1-3 | 1 | L | G | H | V | W | V | A | T | . . . | P | K | S | T | W | Q | Q | G | W |
| 3.1-9 | 1 | L | G | P | V | W | V | H | T | . . . | P | K | S | T | W | Q | Q | G | W |
| 3.2-5 | 1 | L | G | H | V | W | V | D | Q | . . . | P | K | S | T | W | Q | Q | G | W |
| 3.2-19 | 1 | L | G | H | V | W | V | N | Q | . . . | P | K | S | T | W | Q | Q | G | W |
| 3.2-1 | 1 | L | G | H | V | W | V | N | F | . . . | P | K | S | T | W | Q | Q | G | W |
| 3.4-1 | | W | G | F | V | W | S | T | Y | | P | K | S | N | W | Q | Q | G | F |
| 3.4-19 | | W | G | H | V | W | S | T | Y | | P | K | S | N | W | Q | Q | G | Y |
| 3.2-3 | | L | G | H | V | W | V | E | Q | | P | K | S | T | W | Q | Q | G | W |
| 3.2-14 | | L | G | H | V | W | V | G | V | | P | K | S | T | W | Q | Q | G | W |
| 3.2-24 | | L | G | H | V | W | V | H | T | | P | K | S | T | W | Q | Q | G | W |
| 3.4-26 | | W | G | T | V | W | G | T | Y | | P | K | S | N | W | Q | Q | G | Y |
| 3.2-17 | | L | G | H | V | W | V | G | T | | P | K | S | T | W | Q | Q | G | W |

TABLE 6
Additional CH3C Register Positions and Mutations

| Clone name | 378 | 379 | 380 | 381 | 382 | 383 | 384 | 385 | 386 | 387 | 388 | 389 | 390 | 391 | 392 | 411 | 412 | 413 | 414 | 415 | 416 | 417 | 418 | 419 | 420 | 421 | 422 | 423 |
|---|---|---|---|---|---|---|---|---|---|---|---|---|---|---|---|---|---|---|---|---|---|---|---|---|---|---|---|---|
| Wild-type | A | V | E | W | E | S | N | G | Q | P | E | N | N | Y | K | T | V | D | K | S | R | W | Q | Q | G | N | V | F |
| 35.20.1 | . | . | . | . | . | . | F | . | T | E | W | S | S | . | . | . | . | T | . | E | E | . | . | . | . | F | . | . |
| 35.20.2 | . | . | . | . | . | . | Y | . | T | E | W | A | S | . | . | . | . | T | . | E | E | . | . | . | . | F | . | . |
| 35.20.3 | . | . | . | . | . | . | Y | . | T | E | W | V | S | . | . | . | . | T | . | E | E | . | . | . | . | F | . | . |
| 35.20.4 | . | . | . | . | . | . | Y | . | T | E | W | S | S | . | . | . | . | S | . | E | E | . | . | . | . | F | . | . |
| 35.20.5 | . | . | . | . | . | . | F | . | T | E | W | A | S | . | . | . | . | T | . | E | E | . | . | . | . | F | . | . |
| 35.20.6 | . | . | . | . | . | . | F | . | T | E | W | V | S | . | . | . | . | T | . | E | E | . | . | . | . | F | . | . |
| 35.21.a.1 | . | . | W | . | . | . | F | . | T | E | W | S | S | . | . | . | . | T | . | E | E | . | . | . | . | F | . | . |
| 35.21.a.2 | . | . | W | . | . | . | Y | . | T | E | W | A | S | . | . | . | . | T | . | E | E | . | . | . | . | F | . | . |
| 35.21.a.3 | . | . | W | . | . | . | Y | . | T | E | W | V | S | . | . | . | . | T | . | E | E | . | . | . | . | F | . | . |
| 35.21.a.4 | . | . | W | . | . | . | Y | . | T | E | W | S | S | . | . | . | . | S | . | E | E | . | . | . | . | F | . | . |
| 35.21.a.5 | . | . | W | . | . | . | F | . | T | E | W | A | S | . | . | . | . | T | . | E | E | . | . | . | . | F | . | . |
| 35.21.a.6 | . | . | W | . | . | . | F | . | T | E | W | V | S | . | . | . | . | T | . | E | E | . | . | . | . | F | . | . |
| 35.23.1 | . | . | . | . | . | . | F | . | T | E | W | S | . | . | . | . | . | T | . | E | E | . | . | . | . | F | . | . |
| 35.23.2 | . | . | . | . | . | . | Y | . | T | E | W | A | . | . | . | . | . | T | . | E | E | . | . | . | . | F | . | . |
| 35.23.3 | . | . | . | . | . | . | Y | . | T | E | W | V | . | . | . | . | . | T | . | E | E | . | . | . | . | F | . | . |
| 35.23.4 | . | . | . | . | . | . | Y | . | T | E | W | S | . | . | . | . | . | S | . | E | E | . | . | . | . | F | . | . |
| 35.23.5 | . | . | . | . | . | . | F | . | T | E | W | A | . | . | . | . | . | T | . | E | E | . | . | . | . | F | . | . |
| 35.23.6 | . | . | . | . | . | . | F | . | T | E | W | V | . | . | . | . | . | T | . | E | E | . | . | . | . | F | . | . |
| 35.24.1 | . | . | W | . | . | . | F | . | T | E | W | S | . | . | . | . | . | T | . | E | E | . | . | . | . | F | . | . |
| 35.24.2 | . | . | W | . | . | . | Y | . | T | E | W | A | . | . | . | . | . | T | . | E | E | . | . | . | . | F | . | . |
| 35.24.3 | . | . | W | . | . | . | Y | . | T | E | W | V | . | . | . | . | . | T | . | E | E | . | . | . | . | F | . | . |
| 35.24.4 | . | . | W | . | . | . | Y | . | T | E | W | S | . | . | . | . | . | S | . | E | E | . | . | . | . | F | . | . |
| 35.24.5 | . | . | W | . | . | . | F | . | T | E | W | A | . | . | . | . | . | T | . | E | E | . | . | . | . | F | . | . |
| 35.24.6 | . | . | W | . | . | . | F | . | T | E | W | V | . | . | . | . | . | T | . | E | E | . | . | . | . | F | . | . |
| 35.21.17.1 | . | . | L | . | . | . | F | . | T | E | W | S | S | . | . | . | . | T | . | E | E | . | . | . | . | F | . | . |
| 35.21.17.2 | . | . | L | . | . | . | Y | . | T | E | W | A | S | . | . | . | . | T | . | E | E | . | . | . | . | F | . | . |
| 35.21.17.3 | . | . | L | . | . | . | Y | . | T | E | W | V | S | . | . | . | . | T | . | E | E | . | . | . | . | F | . | . |
| 35.21.17.4 | . | . | L | . | . | . | Y | . | T | E | W | S | S | . | . | . | . | S | . | E | E | . | . | . | . | F | . | . |
| 35.21.17.5 | . | . | L | . | . | . | F | . | T | E | W | A | S | . | . | . | . | T | . | E | E | . | . | . | . | F | . | . |
| 35.21.17.6 | . | . | L | . | . | . | F | . | T | E | W | V | S | . | . | . | . | T | . | E | E | . | . | . | . | F | . | . |
| 35.20 | . | . | . | . | . | . | Y | . | T | E | W | S | S | . | . | . | . | T | . | E | E | . | . | . | . | F | . | . |
| 35.21 | . | . | W | . | . | . | Y | . | T | E | W | S | S | . | . | . | . | T | . | E | E | . | . | . | . | F | . | . |
| 35.22 | . | . | W | . | . | . | Y | . | T | E | W | S | . | . | . | . | . | T | . | . | E | . | . | . | . | F | . | . |
| 35.23 | . | . | . | . | . | . | Y | . | T | E | W | S | . | . | . | . | . | T | . | E | E | . | . | . | . | F | . | . |
| 35.24 | . | . | W | . | . | . | Y | . | T | E | W | S | . | . | . | . | . | T | . | E | E | . | . | . | . | F | . | . |
| 35.21.17 | . | . | L | . | . | . | Y | . | T | E | W | S | S | . | . | . | . | T | . | E | E | . | . | . | . | F | . | . |
| 35.N390 | . | . | . | . | . | . | Y | . | T | E | W | S | . | . | . | . | . | T | . | . | E | . | . | . | . | F | . | . |
| 35.20.1.1 | | | | | | | F | | T | E | W | S | S | | | | | S | | E | E | | | | | F | | |
| 35.23.2.1 | | | | | | | Y | | T | E | W | A | | | | | | S | | | E | | | | | F | | |
| 35.23.1.1 | | | | | | | F | | T | E | W | S | | | | | | S | | E | E | | | | | F | | |
| 35.S413 | | | | | | | Y | | T | E | W | S | S | | | | | S | | | E | | | | | F | | |
| 35.23.3.1 | | | | | | | Y | | T | E | W | V | | | | | | S | | E | E | | | | | F | | |
| 35.N390.1 | | | | | | | Y | | T | E | W | S | | | | | | S | | | E | | | | | F | | |
| 35.23.6.1 | | | | | | | F | | T | E | W | V | | | | | | S | | E | E | | | | | F | | |

INFORMAL SEQUENCE LISTING

| SEQ | | |
|---|---|---|
| ID | | |
| NO | Sequence | Description |
| 1 | EVQLVESGGGLVQPGGSLRLSCAASGFNIKDTYIHWVRQAPGKGLEWVARIY | Anti-HER2_DIV fused |
| | PTNGYTRYADSVKGRFTISADTSKNTAYLQMNSLRAEDTAVYYCSRWGGDG | to CH3C.35.23.1.1 with |
| | FYAMDYWGQGTLVTVSSASTKGPSVFPLAPSSKSTSGGTAALGCLVKDYFPE | knob mutation |
| | PVTVSWNSGALTSGVHTFPAVLQSSGLYSLSSVVTVPSSSLGTQTYICNVNHK | |
| | PSNTKVDKKVEPKSCDKTHTCPPCPAPELLGGPSVFLFPPKPKDTLMISRTPEV | |
| | TCVVVDVSHEDPEVKFNWYVDGVEVHNAKTKPREEQYNSTYRVVSVLTVLH | |
| | QDWLNGKEYKCKVSNKALPAPIEKTISKAKGQPREPQVYTLPPSRDELTKNQ | |
| | VSLWCLVKGFYPSDIAVEWESFGTEWSNYKTTPPVLDSDGSFFLYSKLTVSKE | |
| | EWQQGFVFSCSVMHEALHNHYTQKSLSLSPGK | |
| 2 | EVQLVESGGGLVQPGGSLRLSCAASGFNIKDTYIHWVRQAPGKGLEWVARIY | Anti-HER2_DIV fused |
| | PTNGYTRYADSVKGRFTISADTSKNTAYLQMNSLRAEDTAVYYCSRWGGDG | to CH3C.35.23.1.1 with |
| | FYAMDYWGQGTLVTVSSASTKGPSVFPLAPSSKSTSGGTAALGCLVKDYFPE | knob and LALA |
| | PVTVSWNSGALTSGVHTFPAVLQSSGLYSLSSVVTVPSSSLGTQTYICNVNHK | mutations |
| | PSNTKVDKKVEPKSCDKTHTCPPCPAPEAAGGPSVFLFPPKPKDTLMISRTPEV | |
| | TCVVVDVSHEDPEVKFNWYVDGVEVHNAKTKPREEQYNSTYRVVSVLTVLH | |
| | QDWLNGKEYKCKVSNKALPAPIEKTISKAKGQPREPQVYTLPPSRDELTKNQ | |
| | VSLWCLVKGFYPSDIAVEWESFGTEWSNYKTTPPVLDSDGSFFLYSKLTVSKE | |
| | EWQQGFVFSCSVMHEALHNHYTQKSLSLSPGK | |
| 3 | EVQLVESGGGLVQPGGSLRLSCAASGFNIKDTYIHWVRQAPGKGLEWVARIY | Anti-HER2_DIV fused |
| | PTNGYTRYADSVKGRFTISADTSKNTAYLQMNSLRAEDTAVYYCSRWGGDG | to CH3C.35.23.1.1 with |
| | FYAMDYWGQGTLVTVSSASTKGPSVFPLAPSSKSTSGGTAALGCLVKDYFPE | knob and M428L and |
| | PVTVSWNSGALTSGVHTFPAVLQSSGLYSLSSVVTVPSSSLGTQTYICNVNHK | N434S mutations |
| | PSNTKVDKKVEPKSCDKTHTCPPCPAPELLGGPSVFLFPPKPKDTLMISRTPEV | |
| | TCVVVDVSHEDPEVKFNWYVDGVEVHNAKTKPREEQYNSTYRVVSVLTVLH | |
| | QDWLNGKEYKCKVSNKALPAPIEKTISKAKGQPREPQVYTLPPSRDELTKNQ | |
| | VSLWCLVKGFYPSDIAVEWESFGTEWSNYKTTPPVLDSDGSFFLYSKLTVSKE | |
| | EWQQGFVFSCSVLHEALHSHYTQKSLSLSPGK | |
| 4 | EVQLVESGGGLVQPGGSLRLSCAASGFNIKDTYIHWVRQAPGKGLEWVARIY | Anti-HER2_DIV fused |
| | PTNGYTRYADSVKGRFTISADTSKNTAYLQMNSLRAEDTAVYYCSRWGGDG | to CH3C.35.23.1.1 with |
| | FYAMDYWGQGTLVTVSSASTKGPSVFPLAPSSKSTSGGTAALGCLVKDYFPE | knob, LALA, and |
| | PVTVSWNSGALTSGVHTFPAVLQSSGLYSLSSVVTVPSSSLGTQTYICNVNHK | M428L and N434S |
| | PSNTKVDKKVEPKSCDKTHTCPPCPAPEAAGGPSVFLFPPKPKDTLMISRTPEV | mutations |
| | TCVVVDVSHEDPEVKFNWYVDGVEVHNAKTKPREEQYNSTYRVVSVLTVLH | |
| | QDWLNGKEYKCKVSNKALPAPIEKTISKAKGQPREPQVYTLPPSRDELTKNQ | |
| | VSLWCLVKGFYPSDIAVEWESFGTEWSNYKTTPPVLDSDGSFFLYSKLTVSKE | |
| | EWQQGFVFSCSVLHEALHSHYTQKSLSLSPGK | |
| 5 | EVQLVESGGGLVQPGGSLRLSCAASGFNIKDTYIHWVRQAPGKGLEWVARIY | Anti-HER2_DIV fused |
| | PTNGYTRYADSVKGRFTISADTSKNTAYLQMNSLRAEDTAVYYCSRWGGDG | to CH3C.35.23.1.1 with |
| | FYAMDYWGQGTLVTVSSASTKGPSVFPLAPSSKSTSGGTAALGCLVKDYFPE | hole mutations |
| | PVTVSWNSGALTSGVHTFPAVLQSSGLYSLSSVVTVPSSSLGTQTYICNVNHK | |
| | PSNTKVDKKVEPKSCDKTHTCPPCPAPELLGGPSVFLFPPKPKDTLMISRTPEV | |
| | TCVVVDVSHEDPEVKFNWYVDGVEVHNAKTKPREEQYNSTYRVVSVLTVLH | |
| | QDWLNGKEYKCKVSNKALPAPIEKTISKAKGQPREPQVYTLPPSRDELTKNQ | |
| | VSLSCAVKGFYPSDIAVEWESFGTEWSNYKTTPPVLDSDGSFFLVSKLTVSKE | |
| | EWQQGFVFSCSVMHEALHNHYTQKSLSLSPGK | |
| 6 | EVQLVESGGGLVQPGGSLRLSCAASGFNIKDTYIHWVRQAPGKGLEWVARIY | Anti-HER2_DIV fused |
| | PTNGYTRYADSVKGRFTISADTSKNTAYLQMNSLRAEDTAVYYCSRWGGDG | to CH3C.35.23.1.1 with |
| | FYAMDYWGQGTLVTVSSASTKGPSVFPLAPSSKSTSGGTAALGCLVKDYFPE | hole and LALA |
| | PVTVSWNSGALTSGVHTFPAVLQSSGLYSLSSVVTVPSSSLGTQTYICNVNHK | mutations |
| | PSNTKVDKKVEPKSCDKTHTCPPCPAPEAAGGPSVFLFPPKPKDTLMISRTPEV | |
| | TCVVVDVSHEDPEVKFNWYVDGVEVHNAKTKPREEQYNSTYRVVSVLTVLH | |
| | QDWLNGKEYKCKVSNKALPAPIEKTISKAKGQPREPQVYTLPPSRDELTKNQ | |
| | VSLSCAVKGFYPSDIAVEWESFGTEWSNYKTTPPVLDSDGSFFLVSKLTVSKE | |
| | EWQQGFVFSCSVMHEALHNHYTQKSLSLSPGK | |
| 7 | EVQLVESGGGLVQPGGSLRLSCAASGFNIKDTYIHWVRQAPGKGLEWVARIY | Anti-HER2_DIV fused |
| | PTNGYTRYADSVKGRFTISADTSKNTAYLQMNSLRAEDTAVYYCSRWGGDG | to CH3C.35.23.1.1 with |
| | FYAMDYWGQGTLVTVSSASTKGPSVFPLAPSSKSTSGGTAALGCLVKDYFPE | hole and M428L and |
| | PVTVSWNSGALTSGVHTFPAVLQSSGLYSLSSVVTVPSSSLGTQTYICNVNHK | N434S mutations |
| | PSNTKVDKKVEPKSCDKTHTCPPCPAPELLGGPSVFLFPPKPKDTLMISRTPEV | |
| | TCVVVDVSHEDPEVKFNWYVDGVEVHNAKTKPREEQYNSTYRVVSVLTVLH | |
| | QDWLNGKEYKCKVSNKALPAPIEKTISKAKGQPREPQVYTLPPSRDELTKNQ | |
| | VSLSCAVKGFYPSDIAVEWESFGTEWSNYKTTPPVLDSDGSFFLVSKLTVSKE | |
| | EWQQGFVFSCSVLHEALHSHYTQKSLSLSPGK | |
| 8 | EVQLVESGGGLVQPGGSLRLSCAASGFNIKDTYIHWVRQAPGKGLEWVARIY | Anti-HER2_DIV fused |
| | PTNGYTRYADSVKGRFTISADTSKNTAYLQMNSLRAEDTAVYYCSRWGGDG | to CH3C.35.23.1.1 with |
| | FYAMDYWGQGTLVTVSSASTKGPSVFPLAPSSKSTSGGTAALGCLVKDYFPE | hole, LALA, and |
| | PVTVSWNSGALTSGVHTFPAVLQSSGLYSLSSVVTVPSSSLGTQTYICNVNHK | M428L and N434S |
| | PSNTKVDKKVEPKSCDKTHTCPPCPAPEAAGGPSVFLFPPKPKDTLMISRTPEV | mutations |
| | TCVVVDVSHEDPEVKFNWYVDGVEVHNAKTKPREEQYNSTYRVVSVLTVLH | |
| | QDWLNGKEYKCKVSNKALPAPIEKTISKAKGQPREPQVYTLPPSRDELTKNQ | |
| | VSLSCAVKGFYPSDIAVEWESFGTEWSNYKTTPPVLDSDGSFFLVSKLTVSKE | |
| | EWQQGFVFSCSVLHEALHSHYTQKSLSLSPGK | |
| 9 | EVQLVESGGGLVQPGGSLRLSCAASGFNIKDTYIHWVRQAPGKGLEWVARIY | Anti-HER2_DIV fused |
| | PTNGYTRYADSVKGRFTISADTSKNTAYLQMNSLRAEDTAVYYCSRWGGDG | to CH3C.35.23.3 with |
| | FYAMDYWGQGTLVTVSSASTKGPSVFPLAPSSKSTSGGTAALGCLVKDYFPE | knob mutation |
| | PVTVSWNSGALTSGVHTFPAVLQSSGLYSLSSVVTVPSSSLGTQTYICNVNHK | |
| | PSNTKVDKKVEPKSCDKTHTCPPCPAPELLGGPSVFLFPPKPKDTLMISRTPEV | |
| | TCVVVDVSHEDPEVKFNWYVDGVEVHNAKTKPREEQYNSTYRVVSVLTVLH | |
| | QDWLNGKEYKCKVSNKALPAPIEKTISKAKGQPREPQVYTLPPSRDELTKNQ | |
| | VSLWCLVKGFYPSDIAVEWESYGTEWVNYKTTPPVLDSDGSFFLYSKLTVTK | |
| | EEWQQGFVFSCSVMHEALHNHYTQKSLSLSPGK | |
| 10 | EVQLVESGGGLVQPGGSLRLSCAASGFNIKDTYIHWVRQAPGKGLEWVARIY | Anti-HER2_DIV fused |
| | PTNGYTRYADSVKGRFTISADTSKNTAYLQMNSLRAEDTAVYYCSRWGGDG | to CH3C.35.23.3 with |
| | FYAMDYWGQGTLVTVSSASTKGPSVFPLAPSSKSTSGGTAALGCLVKDYFPE | knob and LALA |
| | PVTVSWNSGALTSGVHTFPAVLQSSGLYSLSSVVTVPSSSLGTQTYICNVNHK | mutations |
| | PSNTKVDKKVEPKSCDKTHTCPPCPAPEAAGGPSVFLFPPKPKDTLMISRTPEV | |
| | TCVVVDVSHEDPEVKFNWYVDGVEVHNAKTKPREEQYNSTYRVVSVLTVLH | |
| | QDWLNGKEYKCKVSNKALPAPIEKTISKAKGQPREPQVYTLPPSRDELTKNQ | |
| | VSLWCLVKGFYPSDIAVEWESYGTEWVNYKTTPPVLDSDGSFFLYSKLTVTK | |
| | EEWQQGFVFSCSVMHEALHNHYTQKSLSLSPGK | |
| 11 | EVQLVESGGGLVQPGGSLRLSCAASGFNIKDTYIHWVRQAPGKGLEWVARIY | Anti-HER2_DIV fused |
| | PTNGYTRYADSVKGRFTISADTSKNTAYLQMNSLRAEDTAVYYCSRWGGDG | knob and M428L and |
| | FYAMDYWGQGTLVTVSSASTKGPSVFPLAPSSKSTSGGTAALGCLVKDYFPE | to CH3C.35.23.3 with |
| | PVTVSWNSGALTSGVHTFPAVLQSSGLYSLSSVVTVPSSSLGTQTYICNVNHK | N434S mutations |
| | PSNTKVDKKVEPKSCDKTHTCPPCPAPELLGGPSVFLFPPKPKDTLMISRTPEV | |
| | TCVVVDVSHEDPEVKFNWYVDGVEVHNAKTKPREEQYNSTYRVVSVLTVLH | |
| | QDWLNGKEYKCKVSNKALPAPIEKTISKAKGQPREPQVYTLPPSRDELTKNQ | |
| | VSLWCLVKGFYPSDIAVEWESYGTEWVNYKTTPPVLDSDGSFFLYSKLTVTK | |
| | EEWQQGFVFSCSVLHEALHSHYTQKSLSLSPGK | |
| 12 | EVQLVESGGGLVQPGGSLRLSCAASGFNIKDTYIHWVRQAPGKGLEWVARIY | Anti-HER2_DIV fused |
| | PTNGYTRYADSVKGRFTISADTSKNTAYLQMNSLRAEDTAVYYCSRWGGDG | to CH3C.35.23.3 with |
| | FYAMDYWGQGTLVTVSSASTKGPSVFPLAPSSKSTSGGTAALGCLVKDYFPE | knob, LALA, and |
| | PVTVSWNSGALTSGVHTFPAVLQSSGLYSLSSVVTVPSSSLGTQTYICNVNHK | M428L and N434S |
| | PSNTKVDKKVEPKSCDKTHTCPPCPAPEAAGGPSVFLFPPKPKDTLMISRTPEV | mutations |
| | TCVVVDVSHEDPEVKFNWYVDGVEVHNAKTKPREEQYNSTYRVVSVLTVLH | |
| | QDWLNGKEYKCKVSNKALPAPIEKTISKAKGQPREPQVYTLPPSRDELTKNQ | |
| | VSLWCLVKGFYPSDIAVEWESYGTEWVNYKTTPPVLDSDGSFFLYSKLTVTK | |
| | EEWQQGFVFSCSVLHEALHSHYTQKSLSLSPGK | |
| 13 | EVQLVESGGGLVQPGGSLRLSCAASGFNIKDTYIHWVRQAPGKGLEWVARIY | Anti-HER2_DIV fused |
| | PTNGYTRYADSVKGRFTISADTSKNTAYLQMNSLRAEDTAVYYCSRWGGDG | to CH3C.35.23.3 with |
| | FYAMDYWGQGTLVTVSSASTKGPSVFPLAPSSKSTSGGTAALGCLVKDYFPE | hole mutations |
| | PVTVSWNSGALTSGVHTFPAVLQSSGLYSLSSVVTVPSSSLGTQTYICNVNHK | |
| | PSNTKVDKKVEPKSCDKTHTCPPCPAPELLGGPSVFLFPPKPKDTLMISRTPEV | |
| | TCVVVDVSHEDPEVKFNWYVDGVEVHNAKTKPREEQYNSTYRVVSVLTVLH | |
| | QDWLNGKEYKCKVSNKALPAPIEKTISKAKGQPREPQVYTLPPSRDELTKNQ | |
| | VSLSCAVKGFYPSDIAVEWESYGIEWVNYKTTPPVLDSDGSFFLVSKLTVTKE | |
| | EWQQGFVFSCSVMHEALHNHYTQKSLSLSPGK | |
| 14 | EVQLVESGGGLVQPGGSLRLSCAASGFNIKDTYIHWVRQAPGKGLEWVARIY | Anti-HER2_DIV fused |
| | PTNGYTRYADSVKGRFTISADTSKNTAYLQMNSLRAEDTAVYYCSRWGGDG | to CH3C.35.23.3 with |
| | FYAMDYWGQGTLVTVSSASTKGPSVFPLAPSSKSTSGGTAALGCLVKDYFPE | hole and LALA |
| | PVTVSWNSGALTSGVHTFPAVLQSSGLYSLSSVVTVPSSSLGTQTYICNVNHK | mutations |
| | PSNTKVDKKVEPKSCDKTHTCPPCPAPEAAGGPSVFLFPPKPKDTLMISRTPEV | |
| | TCVVVDVSHEDPEVKFNWYVDGVEVHNAKTKPREEQYNSTYRVVSVLTVLH | |
| | QDWLNGKEYKCKVSNKALPAPIEKTISKAKGQPREPQVYTLPPSRDELTKNQ | |
| | VSLSCAVKGFYPSDIAVEWESYGTEWVNYKTTPPVLDSDGSFFLVSKLTVTKE | |
| | EWQQGFVFSCSVMHEALHNHYTQKSLSLSPGK | |
| 15 | EVQLVESGGGLVQPGGSLRLSCAASGFNIKDTYIHWVRQAPGKGLEWVARIY | Anti-HER2_DIV fused |
| | PTNGYTRYADSVKGRFTISADTSKNTAYLQMNSLRAEDTAVYYCSRWGGDG | to CH3C.35.23.3 with |
| | FYAMDYWGQGTLVTVSSASTKGPSVFPLAPSSKSTSGGTAALGCLVKDYFPE | hole and M428L and |
| | PVTVSWNSGALTSGVHTFPAVLQSSGLYSLSSVVTVPSSSLGTQTYICNVNHK | N434S mutations |
| | PSNTKVDKKVEPKSCDKTHTCPPCPAPELLGGPSVFLFPPKPKDTLMISRTPEV | |
| | TCVVVDVSHEDPEVKFNWYVDGVEVHNAKTKPREEQYNSTYRVVSVLTVLH | |
| | QDWLNGKEYKCKVSNKALPAPIEKTISKAKGQPREPQVYTLPPSRDELTKNQ | |
| | VSLSCAVKGFYPSDIAVEWESYGTEWVNYKTTPPVLDSDGSFFLVSKLTVTKE | |
| | EWQQGFVFSCSVLHEALHSHYTQKSLSLSPGK | |
| 16 | EVQLVESGGGLVQPGGSLRLSCAASGFNIKDTYIHWVRQAPGKGLEWVARIY | Anti-HER2_DIV fused |
| | PTNGYTRYADSVKGRFTISADTSKNTAYLQMNSLRAEDTAVYYCSRWGGDG | to CH3C.35.23.3 with |
| | FYAMDYWGQGTLVTVSSASTKGPSVFPLAPSSKSTSGGTAALGCLVKDYFPE | hole, LALA, and |
| | PVTVSWNSGALTSGVHTFPAVLQSSGLYSLSSVVTVPSSSLGTQTYICNVNHK | M428L and N434S |
| | PSNTKVDKKVEPKSCDKTHTCPPCPAPEAAGGPSVFLFPPKPKDTLMISRTPEV | mutations |
| | TCVVVDVSHEDPEVKFNWYVDGVEVHNAKTKPREEQYNSTYRVVSVLTVLH | |
| | QDWLNGKEYKCKVSNKALPAPIEKTISKAKGQPREPQVYTLPPSRDELTKNQ | |
| | VSLSCAVKGFYPSDIAVEWESYGTEWVNYKTTPPVLDSDGSFFLVSKLTVTKE | |
| | EWQQGFVFSCSVLHEALHSHYTQKSLSLSPGK | |
| 17 | EVQLVESGGGLVQPGGSLRLSCAASGFNIKDTYIHWVRQAPGKGLEWVARIY | Anti-HER2_DIV fused |
| | PTNGYTRYADSVKGRFTISADTSKNTAYLQMNSLRAEDTAVYYCSRWGGDG | to CH3C.35.23.4 with |
| | FYAMDYWGQGTLVTVSSASTKGPSVFPLAPSSKSTSGGTAALGCLVKDYFPE | knob mutation |
| | PVTVSWNSGALTSGVHTFPAVLQSSGLYSLSSVVTVPSSSLGTQTYICNVNHK | |
| | PSNTKVDKKVEPKSCDKTHTCPPCPAPELLGGPSVFLFPPKPKDTLMISRTPEV | |
| | TCVVVDVSHEDPEVKFNWYVDGVEVHNAKTKPREEQYNSTYRVVSVLTVLH | |
| | QDWLNGKEYKCKVSNKALPAPIEKTISKAKGQPREPQVYTLPPSRDELTKNQ | |
| | VSLWCLVKGFYPSDIAVEWESYGTEWSNYKTTPPVLDSDGSFFLYSKLTVSK | |
| | EEWQQGFVFSCSVMHEALHNHYTQKSLSLSPGK | |
| 18 | EVQLVESGGGLVQPGGSLRLSCAASGFNIKDTYIHWVRQAPGKGLEWVARIY | Anti-HER2_DIV fused |
| | PTNGYTRYADSVKGRFTISADTSKNTAYLQMNSLRAEDTAVYYCSRWGGDG | to CH3C.35.23.4 with |
| | FYAMDYWGQGTLVTVSSASTKGPSVFPLAPSSKSTSGGTAALGCLVKDYFPE | knob and LALA |
| | PVTVSWNSGALTSGVHTFPAVLQSSGLYSLSSVVTVPSSSLGTQTYICNVNHK | mutations |
| | PSNTKVDKKVEPKSCDKTHTCPPCPAPEAAGGPSVFLFPPKPKDTLMISRTPEV | |
| | TCVVVDVSHEDPEVKFNWYVDGVEVHNAKTKPREEQYNSTYRVVSVLTVLH | |
| | QDWLNGKEYKCKVSNKALPAPIEKTISKAKGQPREPQVYTLPPSRDELTKNQ | |
| | VSLWCLVKGFYPSDIAVEWESYGTEWSNYKTTPPVLDSDGSFFLYSKLTVSK | |
| | EEWQQGFVFSCSVMHEALHNHYTQKSLSLSPGK | |
| 19 | EVQLVESGGGLVQPGGSLRLSCAASGFNIKDTYIHWVRQAPGKGLEWVARIY | Anti-HER2_DIV fused |
| | PTNGYTRYADSVKGRFTISADTSKNTAYLQMNSLRAEDTAVYYCSRWGGDG | to CH3C.35.23.4 with |
| | FYAMDYWGQGTLVTVSSASTKGPSVFPLAPSSKSTSGGTAALGCLVKDYFPE | knob and M428L and |
| | PVTVSWNSGALTSGVHTFPAVLQSSGLYSLSSVVTVPSSSLGTQTYICNVNHK | N434S mutations |
| | PSNTKVDKKVEPKSCDKTHTCPPCPAPELLGGPSVFLFPPKPKDTLMISRTPEV | |
| | TCVVVDVSHEDPEVKFNWYVDGVEVHNAKTKPREEQYNSTYRVVSVLTVLH | |
| | QDWLNGKEYKCKVSNKALPAPIEKTISKAKGQPREPQVYTLPPSRDELTKNQ | |
| | VSLWCLVKGFYPSDIAVEWESYGTEWSNYKTTPPVLDSDGSFFLYSKLTVSK | |
| | EEWQQGFVFSCSVLHEALHSHYTQKSLSLSPGK | |
| 20 | EVQLVESGGGLVQPGGSLRLSCAASGFNIKDTYIHWVRQAPGKGLEWVARIY | Anti-HER2_DIV fused |
| | PTNGYTRYADSVKGRFTISADTSKNTAYLQMNSLRAEDTAVYYCSRWGGDG | to CH3C.35.23.4 with |
| | FYAMDYWGQGTLVTVSSASTKGPSVFPLAPSSKSTSGGTAALGCLVKDYFPE | knob, LALA, and |
| | PVTVSWNSGALTSGVHTFPAVLQSSGLYSLSSVVTVPSSSLGTQTYICNVNHK | M428L and N434S |
| | PSNTKVDKKVEPKSCDKTHTCPPCPAPEAAGGPSVFLFPPKPKDTLMISRTPEV | mutations |
| | TCVVVDVSHEDPEVKFNWYVDGVEVHNAKTKPREEQYNSTYRVVSVLTVLH | |
| | QDWLNGKEYKCKVSNKALPAPIEKTISKAKGQPREPQVYTLPPSRDELTKNQ | |
| | VSLWCLVKGFYPSDIAVEWESYGTEWSNYKTTPPVLDSDGSFFLYSKLTVSK | |
| | EEWQQGFVFSCSVLHEALHSHYTQKSLSLSPGK | |
| 21 | EVQLVESGGGLVQPGGSLRLSCAASGFNIKDTYIHWVRQAPGKGLEWVARIY | Anti-HER2_DIV fused |
| | PTNGYTRYADSVKGRFTISADTSKNTAYLQMNSLRAEDTAVYYCSRWGGDG | to CH3C.35.23.4 with |
| | FYAMDYWGQGTLVTVSSASTKGPSVFPLAPSSKSTSGGTAALGCLVKDYFPE | hole mutations |
| | PVTVSWNSGALTSGVHTFPAVLQSSGLYSLSSVVTVPSSSLGTQTYICNVNHK | |
| | PSNTKVDKKVEPKSCDKTHTCPPCPAPELLGGPSVFLFPPKPKDTLMISRTPEV | |
| | TCVVVDVSHEDPEVKFNWYVDGVEVHNAKTKPREEQYNSTYRVVSVLTVLH | |
| | QDWLNGKEYKCKVSNKALPAPIEKTISKAKGQPREPQVYTLPPSRDELTKNQ | |
| | VSLSCAVKGFYPSDIAVEWESYGTEWSNYKTTPPVLDSDGSFFLVSKLTVSKE | |
| | EWQQGFVFSCSVMHEALHNHYTQKSLSLSPGK | |
| 22 | EVQLVESGGGLVQPGGSLRLSCAASGFNIKDTYIHWVRQAPGKGLEWVARIY | Anti-HER2_DIV fused |
| | PTNGYTRYADSVKGRFTISADTSKNTAYLQMNSLRAEDTAVYYCSRWGGDG | to CH3C.35.23.4 with |
| | FYAMDYWGQGTLVTVSSASTKGPSVFPLAPSSKSTSGGTAALGCLVKDYFPE | hole and LALA |
| | PVTVSWNSGALTSGVHTFPAVLQSSGLYSLSSVVTVPSSSLGTQTYICNVNHK | mutations |
| | PSNTKVDKKVEPKSCDKTHTCPPCPAPEAAGGPSVFLFPPKPKDTLMISRTPEV | |
| | TCVVVDVSHEDPEVKFNWYVDGVEVHNAKTKPREEQYNSTYRVVSVLTVLH | |
| | QDWLNGKEYKCKVSNKALPAPIEKTISKAKGQPREPQVYTLPPSRDELTKNQ | |
| | VSLSCAVKGFYPSDIAVEWESYGTEWSNYKTTPPVLDSDGSFFLVSKLTVSKE | |
| | EWQQGFVFSCSVMHEALHNHYTQKSLSLSPGK | |
| 23 | EVQLVESGGGLVQPGGSLRLSCAASGFNIKDTYIHWVRQAPGKGLEWVARIY | Anti-HER2_DIV fused |
| | PTNGYTRYADSVKGRFTISADTSKNTAYLQMNSLRAEDTAVYYCSRWGGDG | to CH3C.35.23.4 with |
| | FYAMDYWGQGTLVTVSSASTKGPSVFPLAPSSKSTSGGTAALGCLVKDYFPE | hole and M428L and |
| | PVTVSWNSGALTSGVHTFPAVLQSSGLYSLSSVVTVPSSSLGTQTYICNVNHK | N434S mutations |
| | PSNTKVDKKVEPKSCDKTHTCPPCPAPELLGGPSVFLFPPKPKDTLMISRTPEV | |
| | TCVVVDVSHEDPEVKFNWYVDGVEVHNAKTKPREEQYNSTYRVVSVLTVLH | |
| | QDWLNGKEYKCKVSNKALPAPIEKTISKAKGQPREPQVYTLPPSRDELTKNQ | |
| | VSLSCAVKGFYPSDIAVEWESYGTEWSNYKTTPPVLDSDGSFFLVSKLTVSKE | |
| | EWQQGFVFSCSVLHEALHSHYTQKSLSLSPGK | |
| 24 | EVQLVESGGGLVQPGGSLRLSCAASGFNIKDTYIHWVRQAPGKGLEWVARIY | Anti-HER2_DIV fused |
| | PTNGYTRYADSVKGRFTISADTSKNTAYLQMNSLRAEDTAVYYCSRWGGDG | to CH3C.35.23.4 with |
| | FYAMDYWGQGTLVTVSSASTKGPSVFPLAPSSKSTSGGTAALGCLVKDYFPE | hole, LALA, and |
| | PVTVSWNSGALTSGVHTFPAVLQSSGLYSLSSVVTVPSSSLGTQTYICNVNHK | M428L and N434S |
| | PSNTKVDKKVEPKSCDKTHTCPPCPAPEAAGGPSVFLFPPKPKDTLMISRTPEV | mutations |
| | TCVVVDVSHEDPEVKFNWYVDGVEVHNAKTKPREEQYNSTYRVVSVLTVLH | |
| | QDWLNGKEYKCKVSNKALPAPIEKTISKAKGQPREPQVYTLPPSRDELTKNQ | |
| | VSLSCAVKGFYPSDIAVEWESYGTEWSNYKTTPPVLDSDGSFFLVSKLTVSKE | |
| | EWQQGFVFSCSVLHEALHSHYTQKSLSLSPGK | |
| 25 | EVQLVESGGGLVQPGGSLRLSCAASGFNIKDTYIHWVRQAPGKGLEWVARIY | Anti-HER2 DIV fused |
| | PTNGYTRYADSVKGRFTISADTSKNTAYLQMNSLRAEDTAVYYCSRWGGDG | to Fc with knob |
| | FYAMDYWGQGTLVTVSSASTKGPSVFPLAPSSKSTSGGTAALGCLVKDYFPE | mutation |
| | PVTVSWNSGALTSGVHTFPAVLQSSGLYSLSSVVTVPSSSLGTQTYICNVNHK | |
| | PSNTKVDKKVEPKSCDKTHTCPPCPAPELLGGPSVFLFPPKPKDTLMISRTPEV | |
| | TCVVVDVSHEDPEVKFNWYVDGVEVHNAKTKPREEQYNSTYRVVSVLTVLH | |
| | QDWLNGKEYKCKVSNKALPAPIEKTISKAKGQPREPQVYTLPPSRDELTKNQ | |
| | VSLWCLVKGFYPSDIAVEWESNGQPENNYKTTPPVLDSDGSFFLYSKLTVDK | |
| | SRWQQGNVFSCSVMHEALHNHYTQKSLSLSPGK | |
| 26 | EVQLVESGGGLVQPGGSLRLSCAASGFNIKDTYIHWVRQAPGKGLEWVARIY | Anti-HER2_DIV fused |
| | PTNGYTRYADSVKGRFTISADTSKNTAYLQMNSLRAEDTAVYYCSRWGGDG | to Fc with knob and |
| | FYAMDYWGQGTLVTVSSASTKGPSVFPLAPSSKSTSGGTAALGCLVKDYFPE | M428L and N434S |
| | PVTVSWNSGALTSGVHTFPAVLQSSGLYSLSSVVTVPSSSLGTQTYICNVNHK | mutations |
| | PSNTKVDKKVEPKSCDKTHTCPPCPAPELLGGPSVFLFPPKPKDTLMISRTPEV | |
| | TCVVVDVSHEDPEVKFNWYVDGVEVHNAKTKPREEQYNSTYRVVSVLTVLH | |
| | QDWLNGKEYKCKVSNKALPAPIEKTISKAKGQPREPQVYTLPPSRDELTKNQ | |
| | VSLWCLVKGFYPSDIAVEWESNGQPENNYKTTPPVLDSDGSFFLYSKLTVDK | |
| | SRWQQGNVFSCSVLHEALHSHYTQKSLSLSPGK | |
| 27 | EVQLVESGGGLVQPGGSLRLSCAASGFNIKDTYIHWVRQAPGKGLEWVARIY | Anti-HER2_DIV fused |
| | PTNGYTRYADSVKGRFTISADTSKNTAYLQMNSLRAEDTAVYYCSRWGGDG | to Fc with hole |
| | FYAMDYWGQGTLVTVSSASTKGPSVFPLAPSSKSTSGGTAALGCLVKDYFPE | mutations |
| | PVTVSWNSGALTSGVHTFPAVLQSSGLYSLSSVVTVPSSSLGTQTYICNVNHK | |
| | PSNTKVDKKVEPKSCDKTHTCPPCPAPELLGGPSVFLFPPKPKDTLMISRTPEV | |
| | TCVVVDVSHEDPEVKFNWYVDGVEVHNAKTKPREEQYNSTYRVVSVLTVLH | |
| | QDWLNGKEYKCKVSNKALPAPIEKTISKAKGQPREPQVYTLPPSRDELTKNQ | |
| | VSLSCAVKGFYPSDIAVEWESNGQPENNYKTTPPVLDSDGSFFLVSKLTVDKS | |
| | RWQQGNVFSCSVMHEALHNHYTQKSLSLSPGK | |
| 28 | EVQLVESGGGLVQPGGSLRLSCAASGFNIKDTYIHWVRQAPGKGLEWVARIY | Anti-HER2_DIV fused |
| | PTNGYTRYADSVKGRFTISADTSKNTAYLQMNSLRAEDTAVYYCSRWGGDG | to Fc with hole and |
| | FYAMDYWGQGTLVTVSSASTKGPSVFPLAPSSKSTSGGTAALGCLVKDYFPE | M428L and N434S |
| | PVTVSWNSGALTSGVHTFPAVLQSSGLYSLSSVVTVPSSSLGTQTYICNVNHK | mutations |
| | PSNTKVDKKVEPKSCDKTHTCPPCPAPELLGGPSVFLFPPKPKDTLMISRTPEV | |
| | TCVVVDVSHEDPEVKFNWYVDGVEVHNAKTKPREEQYNSTYRVVSVLTVLH | |
| | QDWLNGKEYKCKVSNKALPAPIEKTISKAKGQPREPQVYTLPPSRDELTKNQ | |
| | VSLSCAVKGFYPSDIAVEWESNGQPENNYKTTPPVLDSDGSFFLVSKLTVDKS | |
| | RWQQGNVFSCSVLHEALHSHYTQKSLSLSPGK | |
| 29 | EVQLVESGGGLVQPGGSLRLSCAASGFTFTDYTMDWVRQAPGKGLEWVAD | Anti-HER2_DII fused |
| | VNPNSGGSIYNQRFKGRFTLSVDRSKNTLYLQMNSLRAEDTAVYYCARNLGP | to CH3C.35.23.1.1 with |
| | SFYFDYWGQGTLVTVSSASTKGPSVFPLAPSSKSTSGGTAALGCLVKDYFPEP | knob mutation |
| | VTVSWNSGALTSGVHTFPAVLQSSGLYSLSSVVTVPSSSLGTQTYICNVNHKP | |
| | SNTKVDKKVEPKSCDKTHTCPPCPAPELLGGPSVFLFPPKPKDTLMISRTPEVT | |
| | CVVVDVSHEDPEVKFNWYVDGVEVHNAKTKPREEQYNSTYRVVSVLTVLH | |
| | QDWLNGKEYKCKVSNKALPAPIEKTISKAKGQPREPQVYTLPPSRDELTKNQ | |
| | VSLWCLVKGFYPSDIAVEWESFGTEWSNYKTTPPVLDSDGSFFLYSKLTVSKE | |
| | EWQQGFVFSCSVMHEALHNHYTQKSLSLSPGK | |
| 30 | EVQLVESGGGLVQPGGSLRLSCAASGFTFTDYTMDWVRQAPGKGLEWVAD | Anti-HER2_DII fused |
| | VNPNSGGSIYNQRFKGRFTLSVDRSKNTLYLQMNSLRAEDTAVYYCARNLGP | to CH3C.35.23.1.1 with |
| | SFYFDYWGQGTLVTVSSASTKGPSVFPLAPSSKSTSGGTAALGCLVKDYFPEP | knob and LALA |
| | VTVSWNSGALTSGVHTFPAVLQSSGLYSLSSVVTVPSSSLGTQTYICNVNHKP | mutations |
| | SNTKVDKKVEPKSCDKTHTCPPCPAPEAAGGPSVFLFPPKPKDTLMISRTPEV | |
| | TCVVVDVSHEDPEVKFNWYVDGVEVHNAKTKPREEQYNSTYRVVSVLTVLH | |
| | QDWLNGKEYKCKVSNKALPAPIEKTISKAKGQPREPQVYTLPPSRDELTKNQ | |
| | VSLWCLVKGFYPSDIAVEWESFGTEWSNYKTTPPVLDSDGSFFLYSKLTVSKE | |
| | EWQQGFVFSCSVMHEALHNHYTQKSLSLSPGK | |
| 31 | EVQLVESGGGLVQPGGSLRLSCAASGFTFTDYTMDWVRQAPGKGLEWVAD | Anti-HER2_DII fused |
| | VNPNSGGSIYNQRFKGRFTLSVDRSKNTLYLQMNSLRAEDTAVYYCARNLGP | to CH3C.35.23.1.1 with |
| | SFYFDYWGQGTLVTVSSASTKGPSVFPLAPSSKSTSGGTAALGCLVKDYFPEP | knob and M428L and |
| | VTVSWNSGALTSGVHTFPAVLQSSGLYSLSSVVTVPSSSLGTQTYICNVNHKP | N434S mutations |
| | SNTKVDKKVEPKSCDKTHTCPPCPAPELLGGPSVFLFPPKPKDTLMISRTPEVT | |
| | CVVVDVSHEDPEVKFNWYVDGVEVHNAKTKPREEQYNSTYRVVSVLTVLH | |
| | QDWLNGKEYKCKVSNKALPAPIEKTISKAKGQPREPQVYTLPPSRDELTKNQ | |
| | VSLWCLVKGFYPSDIAVEWESFGTEWSNYKTTPPVLDSDGSFFLYSKLTVSKE | |
| | EWQQGFVFSCSVLHEALHSHYTQKSLSLSPGK | |
| 32 | EVQLVESGGGLVQPGGSLRLSCAASGFTFTDYTMDWVRQAPGKGLEWVAD | Anti-HER2_DII fused |
| | VNPNSGGSIYNQRFKGRFTLSVDRSKNTLYLQMNSLRAEDTAVYYCARNLGP | to CH3C.35.23.1.1 with |
| | SFYFDYWGQGTLVTVSSASTKGPSVFPLAPSSKSTSGGTAALGCLVKDYFPEP | knob, LALA, and |
| | VTVSWNSGALTSGVHTFPAVLQSSGLYSLSSVVTVPSSSLGTQTYICNVNHKP | M428L and N434S |
| | SNTKVDKKVEPKSCDKTHTCPPCPAPEAAGGPSVFLFPPKPKDTLMISRTPEV | mutations |
| | TCVVVDVSHEDPEVKFNWYVDGVEVHNAKTKPREEQYNSTYRVVSVLTVLH | |
| | QDWLNGKEYKCKVSNKALPAPIEKTISKAKGQPREPQVYTLPPSRDELTKNQ | |
| | VSLWCLVKGFYPSDIAVEWESFGTEWSNYKTTPPVLDSDGSFFLYSKLTVSKE | |
| | EWQQGFVFSCSVLHEALHSHYTQKSLSLSPGK | |
| 33 | EVQLVESGGGLVQPGGSLRLSCAASGFTFTDYTMDWVRQAPGKGLEWVAD | Anti-HER2_DII fused |
| | VNPNSGGSIYNQRFKGRFTLSVDRSKNTLYLQMNSLRAEDTAVYYCARNLGP | to CH3C.35.23.1.1 with |
| | SFYFDYWGQGTLVTVSSASTKGPSVFPLAPSSKSTSGGTAALGCLVKDYFPEP | hole mutations |
| | VTVSWNSGALTSGVHTFPAVLQSSGLYSLSSVVTVPSSSLGTQTYICNVNHKP | |
| | SNTKVDKKVEPKSCDKTHTCPPCPAPELLGGPSVFLFPPKPKDTLMISRTPEVT | |
| | CVVVDVSHEDPEVKFNWYVDGVEVHNAKTKPREEQYNSTYRVVSVLTVLH | |
| | QDWLNGKEYKCKVSNKALPAPIEKTISKAKGQPREPQVYTLPPSRDELTKNQ | |
| | VSLSCAVKGFYPSDIAVEWESFGTEWSNYKTTPPVLDSDGSFFLVSKLTVSKE | |
| | EWQQGFVFSCSVMHEALHNHYTQKSLSLSPGK | |
| 34 | EVQLVESGGGLVQPGGSLRLSCAASGFTFTDYTMDWVRQAPGKGLEWVAD | Anti-HER2_DII fused |
| | VNPNSGGSIYNQRFKGRFTLSVDRSKNTLYLQMNSLRAEDTAVYYCARNLGP | to CH3C.35.23.1.1 with |
| | SFYFDYWGQGTLVTVSSASTKGPSVFPLAPSSKSTSGGTAALGCLVKDYFPEP | hole and LALA |
| | VTVSWNSGALTSGVHTFPAVLQSSGLYSLSSVVTVPSSSLGTQTYICNVNHKP | mutations |
| | SNTKVDKKVEPKSCDKTHTCPPCPAPEAAGGPSVFLFPPKPKDTLMISRTPEV | |
| | TCVVVDVSHEDPEVKFNWYVDGVEVHNAKTKPREEQYNSTYRVVSVLTVLH | |
| | QDWLNGKEYKCKVSNKALPAPIEKTISKAKGQPREPQVYTLPPSRDELTKNQ | |
| | VSLSCAVKGFYPSDIAVEWESFGTEWSNYKTTPPVLDSDGSFFLVSKLTVSKE | |
| | EWQQGFVFSCSVMHEALHNHYTQKSLSLSPGK | |
| 35 | EVQLVESGGGLVQPGGSLRLSCAASGFTFTDYTMDWVRQAPGKGLEWVAD | Anti-HER2_DII fused |
| | VNPNSGGSIYNQRFKGRFTLSVDRSKNTLYLQMNSLRAEDTAVYYCARNLGP | to CH3C.35.23.1.1 with |
| | SFYFDYWGQGTLVTVSSASTKGPSVFPLAPSSKSTSGGTAALGCLVKDYFPEP | hole and M428L and |
| | VTVSWNSGALTSGVHTFPAVLQSSGLYSLSSVVTVPSSSLGTQTYICNVNHKP | N434S mutations |
| | SNTKVDKKVEPKSCDKTHTCPPCPAPELLGGPSVFLFPPKPKDTLMISRTPEVT | |
| | CVVVDVSHEDPEVKFNWYVDGVEVHNAKTKPREEQYNSTYRVVSVLTVLH | |
| | QDWLNGKEYKCKVSNKALPAPIEKTISKAKGQPREPQVYTLPPSRDELTKNQ | |
| | VSLSCAVKGFYPSDIAVEWESFGTEWSNYKTTPPVLDSDGSFFLVSKLTVSKE | |
| | EWQQGFVFSCSVLHEALHSHYTQKSLSLSPGK | |
| 36 | EVQLVESGGGLVQPGGSLRLSCAASGFTFTDYTMDWVRQAPGKGLEWVAD | Anti-HER2_DII fused |
| | VNPNSGGSIYNQRFKGRFTLSVDRSKNTLYLQMNSLRAEDTAVYYCARNLGP | to CH3C.35.23.1.1 with |
| | SFYFDYWGQGTLVTVSSASTKGPSVFPLAPSSKSTSGGTAALGCLVKDYFPEP | hole, LALA, and |
| | VTVSWNSGALTSGVHTFPAVLQSSGLYSLSSVVTVPSSSLGTQTYICNVNHKP | M428L and N434S |
| | SNTKVDKKVEPKSCDKTHTCPPCPAPEAAGGPSVFLFPPKPKDTLMISRTPEV | mutations |
| | TCVVVDVSHEDPEVKFNWYVDGVEVHNAKTKPREEQYNSTYRVVSVLTVLH | |
| | QDWLNGKEYKCKVSNKALPAPIEKTISKAKGQPREPQVYTLPPSRDELTKNQ | |
| | VSLSCAVKGFYPSDIAVEWESFGTEWSNYKTTPPVLDSDGSFFLVSKLTVSKE | |
| | EWQQGFVFSCSVLHEALHSHYTQKSLSLSPGK | |
| 37 | EVQLVESGGGLVQPGGSLRLSCAASGFTFTDYTMDWVRQAPGKGLEWVAD | Anti-HER2_DII fused |
| | VNPNSGGSIYNQRFKGRFTLSVDRSKNTLYLQMNSLRAEDTAVYYCARNLGP | to CH3C.35.23.3 with |
| | SFYFDYWGQGTLVTVSSASTKGPSVFPLAPSSKSTSGGTAALGCLVKDYFPEP | knob mutation |
| | VTVSWNSGALTSGVHTFPAVLQSSGLYSLSSVVTVPSSSLGTQTYICNVNHKP | |
| | SNTKVDKKVEPKSCDKTHTCPPCPAPELLGGPSVFLFPPKPKDTLMISRTPEVT | |
| | CVVVDVSHEDPEVKFNWYVDGVEVHNAKTKPREEQYNSTYRVVSVLTVLH | |
| | QDWLNGKEYKCKVSNKALPAPIEKTISKAKGQPREPQVYTLPPSRDELTKNQ | |
| | VSLWCLVKGFYPSDIAVEWESYGTEWVNYKTTPPVLDSDGSFFLYSKLTVTK | |
| | EEWQQGFVFSCSVMHEALHNHYTQKSLSLSPGK | |
| 38 | EVQLVESGGGLVQPGGSLRLSCAASGFTFTDYTMDWVRQAPGKGLEWVAD | Anti-HER2_DII fused |
| | VNPNSGGSIYNQRFKGRFTLSVDRSKNTLYLQMNSLRAEDTAVYYCARNLGP | to CH3C.35.23.3 with |
| | SFYFDYWGQGTLVTVSSASTKGPSVFPLAPSSKSTSGGTAALGCLVKDYFPEP | knob and LALA |
| | VTVSWNSGALTSGVHTFPAVLQSSGLYSLSSVVTVPSSSLGTQTYICNVNHKP | mutations |
| | SNTKVDKKVEPKSCDKTHTCPPCPAPEAAGGPSVFLFPPKPKDTLMISRTPEV | |
| | TCVVVDVSHEDPEVKFNWYVDGVEVHNAKTKPREEQYNSTYRVVSVLTVLH | |
| | QDWLNGKEYKCKVSNKALPAPIEKTISKAKGQPREPQVYTLPPSRDELTKNQ | |
| | VSLWCLVKGFYPSDIAVEWESYGTEWVNYKTTPPVLDSDGSFFLYSKLTVTK | |
| | EEWQQGFVFSCSVMHEALHNHYTQKSLSLSPGK | |
| 39 | EVQLVESGGGLVQPGGSLRLSCAASGFTFTDYTMDWVRQAPGKGLEWVAD | Anti-HER2_DII fused |
| | VNPNSGGSIYNQRFKGRFTLSVDRSKNTLYLQMNSLRAEDTAVYYCARNLGP | to CH3C.35.23.3 with |
| | SFYFDYWGQGTLVTVSSASTKGPSVFPLAPSSKSTSGGTAALGCLVKDYFPEP | knob and M428L and |
| | VTVSWNSGALTSGVHTFPAVLQSSGLYSLSSVVTVPSSSLGTQTYICNVNHKP | N434S mutations |
| | SNTKVDKKVEPKSCDKTHTCPPCPAPELLGGPSVFLFPPKPKDTLMISRTPEVT | |
| | CVVVDVSHEDPEVKFNWYVDGVEVHNAKTKPREEQYNSTYRVVSVLTVLH | |
| | QDWLNGKEYKCKVSNKALPAPIEKTISKAKGQPREPQVYTLPPSRDELTKNQ | |
| | VSLWCLVKGFYPSDIAVEWESYGTEWVNYKTTPPVLDSDGSFFLYSKLTVTK | |
| | EEWQQGFVFSCSVLHEALHSHYTQKSLSLSPGK | |
| 40 | EVQLVESGGGLVQPGGSLRLSCAASGFTFTDYTMDWVRQAPGKGLEWVAD | Anti-HER2_DII fused |
| | VNPNSGGSIYNQRFKGRFTLSVDRSKNTLYLQMNSLRAEDTAVYYCARNLGP | to CH3C.35.23.3 with |
| | SFYFDYWGQGTLVTVSSASTKGPSVFPLAPSSKSTSGGTAALGCLVKDYFPEP | knob, LALA, and |
| | VTVSWNSGALTSGVHTFPAVLQSSGLYSLSSVVTVPSSSLGTQTYICNVNHKP | M428L and N434S |
| | SNTKVDKKVEPKSCDKTHTCPPCPAPEAAGGPSVFLFPPKPKDTLMISRTPEV | mutations |
| | TCVVVDVSHEDPEVKFNWYVDGVEVHNAKTKPREEQYNSTYRVVSVLTVLH | |
| | QDWLNGKEYKCKVSNKALPAPIEKTISKAKGQPREPQVYTLPPSRDELTKNQ | |
| | VSLWCLVKGFYPSDIAVEWESYGTEWVNYKTTPPVLDSDGSFFLYSKLTVTK | |
| | EEWQQGFVFSCSVLHEALHSHYTQKSLSLSPGK | |
| 41 | EVQLVESGGGLVQPGGSLRLSCAASGFTFTDYTMDWVRQAPGKGLEWVAD | Anti-HER2_DII fused |
| | VNPNSGGSIYNQRFKGRFTLSVDRSKNTLYLQMNSLRAEDTAVYYCARNLGP | to CH3C.35.23.3 with |
| | SFYFDYWGQGTLVTVSSASTKGPSVFPLAPSSKSTSGGTAALGCLVKDYFPEP | hole mutations |
| | VTVSWNSGALTSGVHTFPAVLQSSGLYSLSSVVTVPSSSLGTQTYICNVNHKP | |
| | SNTKVDKKVEPKSCDKTHTCPPCPAPELLGGPSVFLFPPKPKDTLMISRTPEVT | |
| | CVVVDVSHEDPEVKFNWYVDGVEVHNAKTKPREEQYNSTYRVVSVLTVLH | |
| | QDWLNGKEYKCKVSNKALPAPIEKTISKAKGQPREPQVYTLPPSRDELTKNQ | |
| | VSLSCAVKGFYPSDIAVEWESYGTEWVNYKTTPPVLDSDGSFFLVSKLTVTKE | |
| | EWQQGFVFSCSVMHEALHNHYTQKSLSLSPGK | |
| 42 | EVQLVESGGGLVQPGGSLRLSCAASGFTFTDYTMDWVRQAPGKGLEWVAD | Anti-HER2_DII fused |
| | VNPNSGGSIYNQRFKGRFTLSVDRSKNTLYLQMNSLRAEDTAVYYCARNLGP | to CH3C.35.23.3 with |
| | SFYFDYWGQGTLVTVSSASTKGPSVFPLAPSSKSTSGGTAALGCLVKDYFPEP | hole and LALA |
| | VTVSWNSGALTSGVHTFPAVLQSSGLYSLSSVVTVPSSSLGTQTYICNVNHKP | mutations |
| | SNTKVDKKVEPKSCDKTHTCPPCPAPEAAGGPSVFLFPPKPKDTLMISRTPEV | |
| | TCVVVDVSHEDPEVKFNWYVDGVEVHNAKTKPREEQYNSTYRVVSVLTVLH | |
| | QDWLNGKEYKCKVSNKALPAPIEKTISKAKGQPREPQVYTLPPSRDELTKNQ | |
| | VSLSCAVKGFYPSDIAVEWESYGTEWVNYKTTPPVLDSDGSFFLVSKLTVTKE | |
| | EWQQGFVFSCSVMHEALHNHYTQKSLSLSPGK | |
| 43 | EVQLVESGGGLVQPGGSLRLSCAASGFTFTDYTMDWVRQAPGKGLEWVAD | Anti-HER2_DII fused |
| | VNPNSGGSIYNQRFKGRFTLSVDRSKNTLYLQMNSLRAEDTAVYYCARNLGP | to CH3C.35.23.3 with |
| | SFYFDYWGQGTLVTVSSASTKGPSVFPLAPSSKSTSGGTAALGCLVKDYFPEP | hole and M428L and |
| | VTVSWNSGALTSGVHTFPAVLQSSGLYSLSSVVTVPSSSLGTQTYICNVNHKP | N434S mutations |
| | SNTKVDKKVEPKSCDKTHTCPPCPAPELLGGPSVFLFPPKPKDTLMISRTPEVT | |
| | CVVVDVSHEDPEVKFNWYVDGVEVHNAKTKPREEQYNSTYRVVSVLTVLH | |
| | QDWLNGKEYKCKVSNKALPAPIEKTISKAKGQPREPQVYTLPPSRDELTKNQ | |
| | VSLSCAVKGFYPSDIAVEWESYGTEWVNYKTTPPVLDSDGSFFLVSKLTVTKE | |
| | EWQQGFVFSCSVLHEALHSHYTQKSLSLSPGK | |
| 44 | EVQLVESGGGLVQPGGSLRLSCAASGFTFTDYTMDWVRQAPGKGLEWVAD | Anti-HER2_DII fused |
| | VNPNSGGSIYNQRFKGRFTLSVDRSKNTLYLQMNSLRAEDTAVYYCARNLGP | to CH3C.35.23.3 with |
| | SFYFDYWGQGTLVTVSSASTKGPSVFPLAPSSKSTSGGTAALGCLVKDYFPEP | hole, LALA, and |
| | VTVSWNSGALTSGVHTFPAVLQSSGLYSLSSVVTVPSSSLGTQTYICNVNHKP | M428L and N434S |
| | SNTKVDKKVEPKSCDKTHTCPPCPAPEAAGGPSVFLFPPKPKDTLMISRTPEV | mutations |
| | TCVVVDVSHEDPEVKFNWYVDGVEVHNAKTKPREEQYNSTYRVVSVLTVLH | |
| | QDWLNGKEYKCKVSNKALPAPIEKTISKAKGQPREPQVYTLPPSRDELTKNQ | |
| | VSLSCAVKGFYPSDIAVEWESYGTEWVNYKTTPPVLDSDGSFFLVSKLTVTKE | |
| | EWQQGFVFSCSVLHEALHSHYTQKSLSLSPGK | |
| 45 | EVQLVESGGGLVQPGGSLRLSCAASGFTFTDYTMDWVRQAPGKGLEWVAD | Anti-HER2_DII fused |
| | VNPNSGGSIYNQRFKGRFTLSVDRSKNTLYLQMNSLRAEDTAVYYCARNLGP | to CH3C.35.23.4 with |
| | SFYFDYWGQGTLVTVSSASTKGPSVFPLAPSSKSTSGGTAALGCLVKDYFPEP | knob mutation |
| | VTVSWNSGALTSGVHTFPAVLQSSGLYSLSSVVTVPSSSLGTQTYICNVNHKP | |
| | SNTKVDKKVEPKSCDKTHTCPPCPAPELLGGPSVFLFPPKPKDTLMISRTPEVT | |
| | CVVVDVSHEDPEVKFNWYVDGVEVHNAKTKPREEQYNSTYRVVSVLTVLH | |
| | QDWLNGKEYKCKVSNKALPAPIEKTISKAKGQPREPQVYTLPPSRDELTKNQ | |
| | VSLWCLVKGFYPSDIAVEWESYGTEWSNYKTTPPVLDSDGSFFLYSKLTVSK | |
| | EEWQQGFVFSCSVMHEALHNHYTQKSLSLSPGK | |
| 46 | EVQLVESGGGLVQPGGSLRLSCAASGFTFTDYTMDWVRQAPGKGLEWVAD | Anti-HER2_DII fused |
| | VNPNSGGSIYNQRFKGRFTLSVDRSKNTLYLQMNSLRAEDTAVYYCARNLGP | to CH3C.35.23.4 with |
| | SFYFDYWGQGTLVTVSSASTKGPSVFPLAPSSKSTSGGTAALGCLVKDYFPEP | knob and LALA |
| | VTVSWNSGALTSGVHTFPAVLQSSGLYSLSSVVTVPSSSLGTQTYICNVNHKP | mutations |
| | SNTKVDKKVEPKSCDKTHTCPPCPAPEAAGGPSVFLFPPKPKDTLMISRTPEV | |
| | TCVVVDVSHEDPEVKFNWYVDGVEVHNAKTKPREEQYNSTYRVVSVLTVLH | |
| | QDWLNGKEYKCKVSNKALPAPIEKTISKAKGQPREPQVYTLPPSRDELTKNQ | |
| | VSLWCLVKGFYPSDIAVEWESYGTEWSNYKTTPPVLDSDGSFFLYSKLTVSK | |
| | EEWQQGFVFSCSVMHEALHNHYTQKSLSLSPGK | |
| 47 | EVQLVESGGGLVQPGGSLRLSCAASGFTFTDYTMDWVRQAPGKGLEWVAD | Anti-HER2_DII fused |
| | VNPNSGGSIYNQRFKGRFTLSVDRSKNTLYLQMNSLRAEDTAVYYCARNLGP | to CH3C.35.23.4 with |
| | SFYFDYWGQGTLVTVSSASTKGPSVFPLAPSSKSTSGGTAALGCLVKDYFPEP | knob and M428L and |
| | VTVSWNSGALTSGVHTFPAVLQSSGLYSLSSVVTVPSSSLGTQTYICNVNHKP | N434S mutations |
| | SNTKVDKKVEPKSCDKTHTCPPCPAPELLGGPSVFLFPPKPKDTLMISRTPEVT | |
| | CVVVDVSHEDPEVKFNWYVDGVEVHNAKTKPREEQYNSTYRVVSVLTVLH | |
| | QDWLNGKEYKCKVSNKALPAPIEKTISKAKGQPREPQVYTLPPSRDELTKNQ | |
| | VSLWCLVKGFYPSDIAVEWESYGTEWSNYKTTPPVLDSDGSFFLYSKLTVSK | |
| | EEWQQGFVFSCSVLHEALHSHYTQKSLSLSPGK | |
| 48 | EVQLVESGGGLVQPGGSLRLSCAASGFTFTDYTMDWVRQAPGKGLEWVAD | Anti-HER2_DII fused |
| | VNPNSGGSIYNQRFKGRFTLSVDRSKNTLYLQMNSLRAEDTAVYYCARNLGP | to CH3C.35.23.4 with |
| | SFYFDYWGQGTLVTVSSASTKGPSVFPLAPSSKSTSGGTAALGCLVKDYFPEP | knob, LALA, and |
| | VTVSWNSGALTSGVHTFPAVLQSSGLYSLSSVVTVPSSSLGTQTYICNVNHKP | M428L and N434S |
| | SNTKVDKKVEPKSCDKTHTCPPCPAPEAAGGPSVFLFPPKPKDTLMISRTPEV | mutations |
| | TCVVVDVSHEDPEVKFNWYVDGVEVHNAKTKPREEQYNSTYRVVSVLTVLH | |
| | QDWLNGKEYKCKVSNKALPAPIEKTISKAKGQPREPQVYTLPPSRDELTKNQ | |
| | VSLWCLVKGFYPSDIAVEWESYGTEWSNYKTTPPVLDSDGSFFLYSKLTVSK | |
| | EEWQQGFVFSCSVLHEALHSHYTQKSLSLSPGK | |
| 49 | EVQLVESGGGLVQPGGSLRLSCAASGFTFTDYTMDWVRQAPGKGLEWVAD | Anti-HER2_DII fused |
| | VNPNSGGSIYNQRFKGRFTLSVDRSKNTLYLQMNSLRAEDTAVYYCARNLGP | to CH3C.35.23.4 with |
| | SFYFDYWGQGTLVTVSSASTKGPSVFPLAPSSKSTSGGTAALGCLVKDYFPEP | hole mutations |
| | VTVSWNSGALTSGVHTFPAVLQSSGLYSLSSVVTVPSSSLGTQTYICNVNHKP | |
| | SNTKVDKKVEPKSCDKTHTCPPCPAPELLGGPSVFLFPPKPKDTLMISRTPEVT | |
| | CVVVDVSHEDPEVKFNWYVDGVEVHNAKTKPREEQYNSTYRVVSVLTVLH | |
| | QDWLNGKEYKCKVSNKALPAPIEKTISKAKGQPREPQVYTLPPSRDELTKNQ | |
| | VSLSCAVKGFYPSDIAVEWESYGTEWSNYKTTPPVLDSDGSFFLVSKLTVSKE | |
| | EWQQGFVFSCSVMHEALHNHYTQKSLSLSPGK | |
| 50 | EVQLVESGGGLVQPGGSLRLSCAASGFTFTDYTMDWVRQAPGKGLEWVAD | Anti-HER2_DII fused |
| | VNPNSGGSIYNQRFKGRFTLSVDRSKNTLYLQMNSLRAEDTAVYYCARNLGP | to CH3C.35.23.4 with |
| | SFYFDYWGQGTLVTVSSASTKGPSVFPLAPSSKSTSGGTAALGCLVKDYFPEP | hole and LALA |
| | VTVSWNSGALTSGVHTFPAVLQSSGLYSLSSVVTVPSSSLGTQTYICNVNHKP | mutations |
| | SNTKVDKKVEPKSCDKTHTCPPCPAPEAAGGPSVFLFPPKPKDTLMISRTPEV | |
| | TCVVVDVSHEDPEVKFNWYVDGVEVHNAKTKPREEQYNSTYRVVSVLTVLH | |
| | QDWLNGKEYKCKVSNKALPAPIEKTISKAKGQPREPQVYTLPPSRDELTKNQ | |
| | VSLSCAVKGFYPSDIAVEWESYGTEWSNYKTTPPVLDSDGSFFLVSKLTVSKE | |
| | EWQQGFVFSCSVMHEALHNHYTQKSLSLSPGK | |
| 51 | EVQLVESGGGLVQPGGSLRLSCAASGFTFTDYTMDWVRQAPGKGLEWVAD | Anti-HER2_DII fused |
| | VNPNSGGSIYNQRFKGRFTLSVDRSKNTLYLQMNSLRAEDTAVYYCARNLGP | to CH3C.35.23.4 with |
| | SFYFDYWGQGTLVTVSSASTKGPSVFPLAPSSKSTSGGTAALGCLVKDYFPEP | hole and M428L and |
| | VTVSWNSGALTSGVHTFPAVLQSSGLYSLSSVVTVPSSSLGTQTYICNVNHKP | N434S mutations |
| | SNTKVDKKVEPKSCDKTHTCPPCPAPELLGGPSVFLFPPKPKDTLMISRTPEVT | |
| | CVVVDVSHEDPEVKFNWYVDGVEVHNAKTKPREEQYNSTYRVVSVLTVLH | |
| | QDWLNGKEYKCKVSNKALPAPIEKTISKAKGQPREPQVYTLPPSRDELTKNQ | |
| | VSLSCAVKGFYPSDIAVEWESYGTEWSNYKTTPPVLDSDGSFFLVSKLTVSKE | |
| | EWQQGFVFSCSVLHEALHSHYTQKSLSLSPGK | |
| 52 | EVQLVESGGGLVQPGGSLRLSCAASGFTFTDYTMDWVRQAPGKGLEWVAD | Anti-HER2_DII fused |
| | VNPNSGGSIYNQRFKGRFTLSVDRSKNTLYLQMNSLRAEDTAVYYCARNLGP | to CH3C.35.23.4 with |
| | SFYFDYWGQGTLVTVSSASTKGPSVFPLAPSSKSTSGGTAALGCLVKDYFPEP | hole, LALA, and |
| | VTVSWNSGALTSGVHTFPAVLQSSGLYSLSSVVTVPSSSLGTQTYICNVNHKP | M428L and N434S |
| | SNTKVDKKVEPKSCDKTHTCPPCPAPEAAGGPSVFLFPPKPKDTLMISRTPEV | mutations |
| | TCVVVDVSHEDPEVKFNWYVDGVEVHNAKTKPREEQYNSTYRVVSVLTVLH | |
| | QDWLNGKEYKCKVSNKALPAPIEKTISKAKGQPREPQVYTLPPSRDELTKNQ | |
| | VSLSCAVKGFYPSDIAVEWESYGTEWSNYKTTPPVLDSDGSFFLVSKLTVSKE | |
| | EWQQGFVFSCSVLHEALHSHYTQKSLSLSPGK | |
| 53 | EVQLVESGGGLVQPGGSLRLSCAASGFTFTDYTMDWVRQAPGKGLEWVAD | Anti-HER2_DII fused |
| | VNPNSGGSIYNQRFKGRFTLSVDRSKNTLYLQMNSLRAEDTAVYYCARNLGP | to Fc with knob |
| | SFYFDYWGQGTLVTVSSASTKGPSVFPLAPSSKSTSGGTAALGCLVKDYFPEP | mutation |
| | VTVSWNSGALTSGVHTFPAVLQSSGLYSLSSVVTVPSSSLGTQTYICNVNHKP | |
| | SNTKVDKKVEPKSCDKTHTCPPCPAPELLGGPSVFLFPPKPKDTLMISRTPEVT | |
| | CVVVDVSHEDPEVKFNWYVDGVEVHNAKTKPREEQYNSTYRVVSVLTVLH | |
| | QDWLNGKEYKCKVSNKALPAPIEKTISKAKGQPREPQVYTLPPSRDELTKNQ | |
| | VSLWCLVKGFYPSDIAVEWESNGQPENNYKTTPPVLDSDGSFFLYSKLTVDK | |
| | SRWQQGNVFSCSVMHEALHNHYTQKSLSLSPGK | |
| 54 | EVQLVESGGGLVQPGGSLRLSCAASGFTFTDYTMDWVRQAPGKGLEWVAD | Anti-HER2_DII fused |
| | VNPNSGGSIYNQRFKGRFTLSVDRSKNTLYLQMNSLRAEDTAVYYCARNLGP | to Fc with knob and |
| | SFYFDYWGQGTLVTVSSASTKGPSVFPLAPSSKSTSGGTAALGCLVKDYFPEP | M428L and N434S |
| | VTVSWNSGALTSGVHTFPAVLQSSGLYSLSSVVTVPSSSLGTQTYICNVNHKP | mutations |
| | SNTKVDKKVEPKSCDKTHTCPPCPAPELLGGPSVFLFPPKPKDTLMISRTPEVT | |
| | CVVVDVSHEDPEVKFNWYVDGVEVHNAKTKPREEQYNSTYRVVSVLTVLH | |
| | QDWLNGKEYKCKVSNKALPAPIEKTISKAKGQPREPQVYTLPPSRDELTKNQ | |
| | VSLWCLVKGFYPSDIAVEWESNGQPENNYKTTPPVLDSDGSFFLYSKLTVDK | |
| | SRWQQGNVFSCSVLHEALHSHYTQKSLSLSPGK | |
| 55 | EVQLVESGGGLVQPGGSLRLSCAASGFTFTDYTMDWVRQAPGKGLEWVAD | Anti-HER2_DII fused |
| | VNPNSGGSIYNQRFKGRFTLSVDRSKNTLYLQMNSLRAEDTAVYYCARNLGP | to Fc with hole |
| | SFYFDYWGQGTLVTVSSASTKGPSVFPLAPSSKSTSGGTAALGCLVKDYFPEP | mutations |
| | VTVSWNSGALTSGVHTFPAVLQSSGLYSLSSVVTVPSSSLGTQTYICNVNHKP | |
| | SNTKVDKKVEPKSCDKTHTCPPCPAPELLGGPSVFLFPPKPKDTLMISRTPEVT | |
| | CVVVDVSHEDPEVKFNWYVDGVEVHNAKTKPREEQYNSTYRVVSVLTVLH | |
| | QDWLNGKEYKCKVSNKALPAPIEKTISKAKGQPREPQVYTLPPSRDELTKNQ | |
| | VSLSCAVKGFYPSDIAVEWESNGQPENNYKTTPPVLDSDGSFFLVSKLTVDKS | |
| | RWQQGNVFSCSVMHEALHNHYTQKSLSLSPGK | |
| 56 | EVQLVESGGGLVQPGGSLRLSCAASGFTFTDYTMDWVRQAPGKGLEWVAD | Anti-HER2_DII fused |
| | VNPNSGGSIYNQRFKGRFTLSVDRSKNTLYLQMNSLRAEDTAVYYCARNLGP | to Fc with hole and |
| | SFYFDYWGQGTLVTVSSASTKGPSVFPLAPSSKSTSGGTAALGCLVKDYFPEP | M428L and N434S |
| | VTVSWNSGALTSGVHTFPAVLQSSGLYSLSSVVTVPSSSLGTQTYICNVNHKP | mutations |
| | SNTKVDKKVEPKSCDKTHTCPPCPAPELLGGPSVFLFPPKPKDTLMISRTPEVT | |
| | CVVVDVSHEDPEVKFNWYVDGVEVHNAKTKPREEQYNSTYRVVSVLTVLH | |
| | QDWLNGKEYKCKVSNKALPAPIEKTISKAKGQPREPQVYTLPPSRDELTKNQ | |
| | VSLSCAVKGFYPSDIAVEWESNGQPENNYKTTPPVLDSDGSFFLVSKLTVDKS | |
| | RWQQGNVFSCSVLHEALHSHYTQKSLSLSPGK | |
| 57 | DIQMTQSPSSLSASVGDRVTITCRASQDVNTAVAWYQQKPGKAPKLLIYSASF | Anti-HER2_DIV light |
| | LYSGVPSRFSGSRSGTDFTLTISSLQPEDFATYYCQQHYTTPPTFGQGTKVEIK | chain |
| | RTVAAPSVFIFPPSDEQLKSGTASVVCLLNNFYPREAKVQWKVDNALQSGNS | |
| | QESVTEQDSKDSTYSLSSTLTLSKADYEKHKVYACEVTHQGLSSPVTKSFNRG | |
| | EC | |
| 58 | DIQMTQSPSSLSASVGDRVTITCKASQDVSIGVAWYQQKPGKAPKLLIYSASY | Anti-HER2_DII light |
| | RYTGVPSRFSGSGSGTDFTLTISSLQPEDFATYYCQQYYIYPYTFGQGTKVEIK | chain |
| | RTVAAPSVFIFPPSDEQLKSGTASVVCLLNNFYPREAKVQWKVDNALQSGNS | |
| | QESVTEQDSKDSTYSLSSTLTLSKADYEKHKVYACEVTHQGLSSPVTKSFNRG | |
| | EC | |
| 59 | EVQLVESGGGLVQPGGSLRLSCAASGFNIKDTYIHWVRQAPGKGLEWVARIY | Anti-HER2_DIV VH |
| | PTNGYTRYADSVKGRFTISADTSKNTAYLQMNSLRAEDTAVYYCSRWGGDG | sequence |
| | FYAMDYWGQGTLVTVSS | |
| 60 | DIQMTQSPSSLSASVGDRVTITCRASQDVNTAVAWYQQKPGKAPKLLIYSASF | Anti-HER2_DIV VL |
| | LYSGVPSRFSGSRSGTDFTLTISSLQPEDFATYYCQQHYTTPPTFGQGTKVEIK | sequence |
| 61 | EVQLVESGGGLVQPGGSLRLSCAASGFTFTDYTMDWVRQAPGKGLEWVAD | Anti-HER2 DII VH |
| | VNPNSGGSIYNQRFKGRFTLSVDRSKNTLYLQMNSLRAEDTAVYYCARNLGP | sequence |
| | SFYFDYWGQGTLVTVSS | |
| 62 | DIQMTQSPSSLSASVGDRVTITCKASQDVSIGVAWYQQKPGKAPKLLIYSASY | Anti-HER2_DII VL |
| | RYTGVPSRFSGSGSGTDFTLTISSLQPEDFATYYCQQYYTYPYTFGQGTKVEIK | sequence |
| 63 | APEX₁X₂GGPSVFLFPPKPKDTLMISRTPEVTCVVVDVSHEDPEVKFNWYVDG | Consensus sequence for |
| | VEVHNAKTKPREEQYNSTYRVVSVLTVLHQDWLNGKEYKCKVSNKALPAPI | CH3C.35.23.1.1, |
| | EKTISKAKGQPREPQVYTLPPSRDELTKNQVSLWCLVKGFYPSDIAVEWESX₃ | CH3C.35.23.3, |
| | GTEWX₄NYKTTPPVLDSDGSFFLYSKLTVX₅KEEWQQGFVFSCSVX₆HEALHX₇ | CH3C.35.23.4, and |
| | HYTQKSLSLSPGK, wherein X₁ is L or A; X₂ is L or A; X₃ is F | CH3C.35.23 with knob |
| | or Y; X₄ is S or V; X₅ is S or T; X₆ is M or L; | and LALA mutations; |
| | and X₇ is N or S | M428L and N434S |
| | | mutations are part of |
| | | consensus sequence |
| 64 | APEX₁X₂GGPSVFLFPPKPKDTLMISRTPEVTCVVVDVSHEDPEVKFNWYVDG | Consensus sequence for |
| | VEVHNAKTKPREEQYNSTYRVVSVLTVLHQDWLNGKEYKCKVSNKALPAPI | CH3C.35.23.1.1, |
| | EKTISKAKGQPREPQVYTLPPSRDELTKNQVSLSCAVKGFYPSDIAVEWESX₃G | CH3C.35.23.3, |
| | TEWX₄NYKTTPPVLDSDGSFFLVSKLTVX₅KEEWQQGFVFSCSVX₆HEALHX₇H | CH3C.35.23.4,, and |
| | YTQKSLSLSPGK, wherein X₁ is L or A; X₂ is L or A; X₃ is F | CH3C.35.23 with hole |
| | or Y; X₄ is S or V; X₅ is S or T; X₆ is M or L; | and LALA mutations; |
| | and X₇ is N or S | M428L and N434S |
| | | mutations are part of |
| | | consensus sequence |
| 65 | APELLGGPSVFLFPPKPKDTLMISRTPEVTCVVVDVSHEDPEVKFNWYVDGVE | Fc sequence with knob |
| | VHNAKTKPREEQYNSTYRVVSVLTVLHQDWLNGKEYKCKVSNKALPAPIEK | mutation |
| | TISKAKGQPREPQVYTLPPSRDELTKNQVSLWCLVKGFYPSDIAVEWESNGQP | |
| | ENNYKTTPPVLDSDGSFFLYSKLTVDKSRWQQGNVFSCSVMHEALHNHYTQ | |
| | KSLSLSPGK | |
| 66 | APELLGGPSVFLFPPKPKDTLMISRTPEVTCVVVDVSHEDPEVKFNWYVDGVE | Fc sequence with knob |
| | VHNAKTKPREEQYNSTYRVVSVLTVLHQDWLNGKEYKCKVSNKALPAPIEK | and M428L and N434S |
| | TISKAKGQPREPQVYTLPPSRDELTKNQVSLWCLVKGFYPSDIAVEWESNGQP | mutations |
| | ENNYKTTPPVLDSDGSFFLYSKLTVDKSRWQQGNVFSCSVLHEALHSHYTQK | |
| | SLSLSPGK | |
| 67 | APELLGGPSVFLFPPKPKDTLMISRTPEVTCVVVDVSHEDPEVKFNWYVDGVE | Fc sequence with hole |
| | VHNAKTKPREEQYNSTYRVVSVLTVLHQDWLNGKEYKCKVSNKALPAPIEK | mutations |
| | TISKAKGQPREPQVYTLPPSRDELTKNQVSLSCAVKGFYPSDIAVEWESNGQP | |
| | ENNYKTTPPVLDSDGSFFLVSKLTVDKSRWQQGNVFSCSVMHEALHNHYTQ | |
| | KSLSLSPGK | |
| 68 | APELLGGPSVFLFPPKPKDTLMISRTPEVTCVVVDVSHEDPEVKFNWYVDGVE | Fc sequence with hole |
| | VHNAKTKPREEQYNSTYRVVSVLTVLHQDWLNGKEYKCKVSNKALPAPIEK | and M428L and N434S |
| | TISKAKGQPREPQVYTLPPSRDELTKNQVSLSCAVKGFYPSDIAVEWESNGQP | mutations |
| | ENNYKTTPPVLDSDGSFFLVSKLTVDKSRWQQGNVFSCSVLHEALHSHYTQK | |
| | SLSLSPGK | |
| 69 | GFNIKDTYIH | Anti-HER2_DIV CDR- |
| | | H1 |
| 70 | RIYPTNGYTRYADSVKG | Anti-HER2_DIV CDR- |
| | | H2 |
| 71 | SRWGGDGFYAMDY | Anti-HER2_DIV CDR- |
| | | H3 |
| 72 | RASQDVNTAVA | Anti-HER2_DIV CDR- |
| | | L1 |
| 73 | SASFLYS | Anti-HER2_DIV CDR- |
| | | L2 |
| 74 | QQHYTTPPT | Anti-HER2_DIV CDR- |
| | | L3 |
| 75 | GFTFTDYTMD | Anti-HER2_DII CDR- |
| | | H1 |
| 76 | DVNPNSGGSIYNQRFKG | Anti-HER2_DII CDR- |
| | | H2 |
| 77 | ARNLGPSFYFDY | Anti-HER2_DII CDR- |
| | | H3 |
| 78 | KASQDVSIGVA | Anti-HER2_DII CDR- |
| | | L1 |
| 79 | SASYRYT | Anti-HER2_DII CDR- |
| | | L2 |
| 80 | QQYYIYPYT | Anti-HER2_DII CDR- |
| | | L3 |
| 81 | EVQLVESGGGLVQPGGSLRLSCAASGFNIKDTYIHWVRQAPGKGLEWVARIY | Anti-HER2_DIV fused |
| | PTNGYTRYADSVKGRFTISADTSKNTAYLQMNSLRAEDTAVYYCSRWGGDG | to CH3C.35.23 with |
| | FYAMDYWGQGTLVTVSSASTKGPSVFPLAPSSKSTSGGTAALGCLVKDYFPE | knob mutation |
| | PVTVSWNSGALTSGVHTFPAVLQSSGLYSLSSVVTVPSSSLGTQTYICNVNHK | |
| | PSNTKVDKKVEPKSCDKTHTCPPCPAPELLGGPSVFLFPPKPKDTLMISRTPEV | |
| | TCVVVDVSHEDPEVKFNWYVDGVEVHNAKTKPREEQYNSTYRVVSVLTVLH | |
| | QDWLNGKEYKCKVSNKALPAPIEKTISKAKGQPREPQVYTLPPSRDELTKNQ | |
| | VSLWCLVKGFYPSDIAVEWESYGTEWSNYKTTPPVLDSDGSFFLYSKLTVTK | |
| | EEWQQGFVFSCSVMHEALHNHYTQKSLSLSPGK | |
| 82 | EVQLVESGGGLVQPGGSLRLSCAASGFNIKDTYIHWVRQAPGKGLEWVARIY | Anti-HER2_DIV fused |
| | PTNGYTRYADSVKGRFTISADTSKNTAYLQMNSLRAEDTAVYYCSRWGGDG | to CH3C.35.23 with |
| | FYAMDYWGQGTLVTVSSASTKGPSVFPLAPSSKSTSGGTAALGCLVKDYFPE | knob and LALA |
| | PVTVSWNSGALTSGVHTFPAVLQSSGLYSLSSVVTVPSSSLGTQTYICNVNHK | mutations |
| | PSNTKVDKKVEPKSCDKTHTCPPCPAPEAAGGPSVFLFPPKPKDTLMISRTPEV | |
| | TCVVVDVSHEDPEVKFNWYVDGVEVHNAKTKPREEQYNSTYRVVSVLTVLH | |
| | QDWLNGKEYKCKVSNKALPAPIEKTISKAKGQPREPQVYTLPPSRDELTKNQ | |
| | VSLWCLVKGFYPSDIAVEWESYGTEWSNYKTTPPVLDSDGSFFLYSKLTVTK | |
| | EEWQQGFVFSCSVMHEALHNHYTQKSLSLSPGK | |
| 83 | EVQLVESGGGLVQPGGSLRLSCAASGFNIKDTYIHWVRQAPGKGLEWVARIY | Anti-HER2_DIV fused |
| | PTNGYTRYADSVKGRFTISADTSKNTAYLQMNSLRAEDTAVYYCSRWGGDG | to CH3C.35.23 with |
| | FYAMDYWGQGTLVTVSSASTKGPSVFPLAPSSKSTSGGTAALGCLVKDYFPE | knob and M428L and |
| | PVTVSWNSGALTSGVHTFPAVLQSSGLYSLSSVVTVPSSSLGTQTYICNVNHK | N434S mutations |
| | PSNTKVDKKVEPKSCDKTHTCPPCPAPELLGGPSVFLFPPKPKDTLMISRTPEV | |
| | TCVVVDVSHEDPEVKFNWYVDGVEVHNAKTKPREEQYNSTYRVVSVLTVLH | |
| | QDWLNGKEYKCKVSNKALPAPIEKTISKAKGQPREPQVYTLPPSRDELTKNQ | |
| | VSLWCLVKGFYPSDIAVEWESYGTEWSNYKTTPPVLDSDGSFFLYSKLTVTK | |
| | EEWQQGFVFSCSVLHEALHSHYTQKSLSLSPGK | |
| 84 | EVQLVESGGGLVQPGGSLRLSCAASGFNIKDTYIHWVRQAPGKGLEWVARIY | Anti-HER2_DIV fused |
| | PTNGYTRYADSVKGRFTISADTSKNTAYLQMNSLRAEDTAVYYCSRWGGDG | to CH3C.35.23 with |
| | FYAMDYWGQGTLVTVSSASTKGPSVFPLAPSSKSTSGGTAALGCLVKDYFPE | knob, LALA, and |
| | PVTVSWNSGALTSGVHTFPAVLQSSGLYSLSSVVTVPSSSLGTQTYICNVNHK | M428L and N434S |
| | PSNTKVDKKVEPKSCDKTHTCPPCPAPEAAGGPSVFLFPPKPKDTLMISRTPEV | mutations |
| | TCVVVDVSHEDPEVKFNWYVDGVEVHNAKTKPREEQYNSTYRVVSVLTVLH | |
| | QDWLNGKEYKCKVSNKALPAPIEKTISKAKGQPREPQVYTLPPSRDELTKNQ | |
| | VSLWCLVKGFYPSDIAVEWESYGTEWSNYKTTPPVLDSDGSFFLYSKLTVTK | |
| | EEWQQGFVFSCSVLHEALHSHYTQKSLSLSPGK | |
| 85 | EVQLVESGGGLVQPGGSLRLSCAASGFNIKDTYIHWVRQAPGKGLEWVARIY | Anti-HER2_DIV fused |
| | PTNGYTRYADSVKGRFTISADTSKNTAYLQMNSLRAEDTAVYYCSRWGGDG | to CH3C.35.23 with |
| | FYAMDYWGQGTLVTVSSASTKGPSVFPLAPSSKSTSGGTAALGCLVKDYFPE | hole mutations |
| | PVTVSWNSGALTSGVHTFPAVLQSSGLYSLSSVVTVPSSSLGTQTYICNVNHK | |
| | PSNTKVDKKVEPKSCDKTHTCPPCPAPELLGGPSVFLFPPKPKDTLMISRTPEV | |
| | TCVVVDVSHEDPEVKFNWYVDGVEVHNAKTKPREEQYNSTYRVVSVLTVLH | |
| | QDWLNGKEYKCKVSNKALPAPIEKTISKAKGQPREPQVYTLPPSRDELTKNQ | |
| | VSLSCAVKGFYPSDIAVEWESYGTEWSNYKTTPPVLDSDGSFFLVSKLTVTKE | |
| | EWQQGFVFSCSVMHEALHNHYTQKSLSLSPGK | |
| 86 | EVQLVESGGGLVQPGGSLRLSCAASGFNIKDTYIHWVRQAPGKGLEWVARIY | Anti-HER2_DIV fused |
| | PTNGYTRYADSVKGRFTISADTSKNTAYLQMNSLRAEDTAVYYCSRWGGDG | to CH3C.35.23 with |
| | FYAMDYWGQGTLVTVSSASTKGPSVFPLAPSSKSTSGGTAALGCLVKDYFPE | hole and LALA |
| | PVTVSWNSGALTSGVHTFPAVLQSSGLYSLSSVVTVPSSSLGTQTYICNVNHK | mutations |
| | PSNTKVDKKVEPKSCDKTHTCPPCPAPEAAGGPSVFLFPPKPKDTLMISRTPEV | |
| | TCVVVDVSHEDPEVKFNWYVDGVEVHNAKTKPREEQYNSTYRVVSVLTVLH | |
| | QDWLNGKEYKCKVSNKALPAPIEKTISKAKGQPREPQVYTLPPSRDELTKNQ | |
| | VSLSCAVKGFYPSDIAVEWESYGTEWSNYKTTPPVLDSDGSFFLVSKLTVTKE | |
| | EWQQGFVFSCSVMHEALHNHYTQKSLSLSPGK | |
| 87 | EVQLVESGGGLVQPGGSLRLSCAASGFNIKDTYIHWVRQAPGKGLEWVARIY | Anti-HER2_DIV fused |
| | PTNGYTRYADSVKGRFTISADTSKNTAYLQMNSLRAEDTAVYYCSRWGGDG | to CH3C.35.23 with |
| | FYAMDYWGQGTLVTVSSASTKGPSVFPLAPSSKSTSGGTAALGCLVKDYFPE | hole and M428L and |
| | PVTVSWNSGALTSGVHTFPAVLQSSGLYSLSSVVTVPSSSLGTQTYICNVNHK | N434S mutations |
| | PSNTKVDKKVEPKSCDKTHTCPPCPAPELLGGPSVFLFPPKPKDTLMISRTPEV | |
| | TCVVVDVSHEDPEVKFNWYVDGVEVHNAKTKPREEQYNSTYRVVSVLTVLH | |
| | QDWLNGKEYKCKVSNKALPAPIEKTISKAKGQPREPQVYTLPPSRDELTKNQ | |
| | VSLSCAVKGFYPSDIAVEWESYGTEWSNYKTTPPVLDSDGSFFLVSKLTVTKE | |
| | EWQQGFVFSCSVLHEALHSHYTQKSLSLSPGK | |
| 88 | EVQLVESGGGLVQPGGSLRLSCAASGFNIKDTYIHWVRQAPGKGLEWVARIY | Anti-HER2_DIV fused |
| | PTNGYTRYADSVKGRFTISADTSKNTAYLQMNSLRAEDTAVYYCSRWGGDG | to CH3C.35.23 with |
| | FYAMDYWGQGTLVTVSSASTKGPSVFPLAPSSKSTSGGTAALGCLVKDYFPE | hole, LALA, and |
| | PVTVSWNSGALTSGVHTFPAVLQSSGLYSLSSVVTVPSSSLGTQTYICNVNHK | M428L and N434S |
| | PSNTKVDKKVEPKSCDKTHTCPPCPAPEAAGGPSVFLFPPKPKDTLMISRTPEV | mutations |
| | TCVVVDVSHEDPEVKFNWYVDGVEVHNAKTKPREEQYNSTYRVVSVLTVLH | |
| | QDWLNGKEYKCKVSNKALPAPIEKTISKAKGQPREPQVYTLPPSRDELTKNQ | |
| | VSLSCAVKGFYPSDIAVEWESYGTEWSNYKTTPPVLDSDGSFFLVSKLTVTKE | |
| | EWQQGFVFSCSVLHEALHSHYTQKSLSLSPGK | |
| 89 | EVQLVESGGGLVQPGGSLRLSCAASGFTFTDYTMDWVRQAPGKGLEWVAD | Anti-HER2_DII fused |
| | VNPNSGGSIYNQRFKGRFTLSVDRSKNTLYLQMNSLRAEDTAVYYCARNLGP | CH3C.35.23 to with |
| | SFYFDYWGQGTLVTVSSASTKGPSVFPLAPSSKSTSGGTAALGCLVKDYFPEP | knob mutation |
| | VTVSWNSGALTSGVHTFPAVLQSSGLYSLSSVVTVPSSSLGTQTYICNVNHKP | |
| | SNTKVDKKVEPKSCDKTHTCPPCPAPELLGGPSVFLFPPKPKDTLMISRTPEVT | |
| | CVVVDVSHEDPEVKFNWYVDGVEVHNAKTKPREEQYNSTYRVVSVLTVLH | |
| | QDWLNGKEYKCKVSNKALPAPIEKTISKAKGQPREPQVYTLPPSRDELTKNQ | |
| | VSLWCLVKGFYPSDIAVEWESYGTEWSNYKTTPPVLDSDGSFFLYSKLTVTK | |
| | EEWQQGFVFSCSVMHEALHNHYTQKSLSLSPGK | |
| 90 | EVQLVESGGGLVQPGGSLRLSCAASGFTFTDYTMDWVRQAPGKGLEWVAD | Anti-HER2_DII fused |
| | VNPNSGGSIYNQRFKGRFTLSVDRSKNTLYLQMNSLRAEDTAVYYCARNLGP | to CH3C.35.23 with |
| | SFYFDYWGQGTLVTVSSASTKGPSVFPLAPSSKSTSGGTAALGCLVKDYFPEP | knob and LALA |
| | VTVSWNSGALTSGVHTFPAVLQSSGLYSLSSVVTVPSSSLGTQTYICNVNHKP | mutations |
| | SNTKVDKKVEPKSCDKTHTCPPCPAPEAAGGPSVFLFPPKPKDTLMISRTPEV | |
| | TCVVVDVSHEDPEVKFNWYVDGVEVHNAKTKPREEQYNSTYRVVSVLTVLH | |
| | QDWLNGKEYKCKVSNKALPAPIEKTISKAKGQPREPQVYTLPPSRDELTKNQ | |
| | VSLWCLVKGFYPSDIAVEWESYGTEWSNYKTTPPVLDSDGSFFLYSKLTVTK | |
| | EEWQQGFVFSCSVMHEALHNHYTQKSLSLSPGK | |
| 91 | EVQLVESGGGLVQPGGSLRLSCAASGFTFTDYTMDWVRQAPGKGLEWVAD | Anti-HER2_DII fused |
| | VNPNSGGSIYNQRFKGRFTLSVDRSKNTLYLQMNSLRAEDTAVYYCARNLGP | to CH3C.35.23 with |
| | SFYFDYWGQGTLVTVSSASTKGPSVFPLAPSSKSTSGGTAALGCLVKDYFPEP | knob and M428L and |
| | VTVSWNSGALTSGVHTFPAVLQSSGLYSLSSVVTVPSSSLGTQTYICNVNHKP | N434S mutations |
| | SNTKVDKKVEPKSCDKTHTCPPCPAPELLGGPSVFLFPPKPKDTLMISRTPEVT | |
| | CVVVDVSHEDPEVKFNWYVDGVEVHNAKTKPREEQYNSTYRVVSVLTVLH | |
| | QDWLNGKEYKCKVSNKALPAPIEKTISKAKGQPREPQVYTLPPSRDELTKNQ | |
| | VSLWCLVKGFYPSDIAVEWESYGTEWSNYKTTPPVLDSDGSFFLYSKLTVTK | |
| | EEWQQGFVFSCSVLHEALHSHYTQKSLSLSPGK | |
| 92 | EVQLVESGGGLVQPGGSLRLSCAASGFTFTDYTMDWVRQAPGKGLEWVAD | Anti-HER2_DII fused |
| | VNPNSGGSIYNQRFKGRFTLSVDRSKNTLYLQMNSLRAEDTAVYYCARNLGP | to CH3C.35.23 with |
| | SFYFDYWGQGTLVTVSSASTKGPSVFPLAPSSKSTSGGTAALGCLVKDYFPEP | knob, LALA, and |
| | VTVSWNSGALTSGVHTFPAVLQSSGLYSLSSVVTVPSSSLGTQTYICNVNHKP | M428L and N434S |
| | SNTKVDKKVEPKSCDKTHTCPPCPAPEAAGGPSVFLFPPKPKDTLMISRTPEV | mutations |
| | TCVVVDVSHEDPEVKFNWYVDGVEVHNAKTKPREEQYNSTYRVVSVLTVLH | |
| | QDWLNGKEYKCKVSNKALPAPIEKTISKAKGQPREPQVYTLPPSRDELTKNQ | |
| | VSLWCLVKGFYPSDIAVEWESYGTEWSNYKTTPPVLDSDGSFFLYSKLTVTK | |
| | EEWQQGFVFSCSVLHEALHSHYTQKSLSLSPGK | |
| 93 | EVQLVESGGGLVQPGGSLRLSCAASGFTFTDYTMDWVRQAPGKGLEWVAD | Anti-HER2_DII fused |
| | VNPNSGGSIYNQRFKGRFTLSVDRSKNTLYLQMNSLRAEDTAVYYCARNLGP | to CH3C.35.23 with |
| | SFYFDYWGQGTLVTVSSASTKGPSVFPLAPSSKSTSGGTAALGCLVKDYFPEP | hole mutations |
| | VTVSWNSGALTSGVHTFPAVLQSSGLYSLSSVVTVPSSSLGTQTYICNVNHKP | |
| | SNTKVDKKVEPKSCDKTHTCPPCPAPELLGGPSVFLFPPKPKDTLMISRTPEVT | |
| | CVVVDVSHEDPEVKFNWYVDGVEVHNAKTKPREEQYNSTYRVVSVLTVLH | |
| | QDWLNGKEYKCKVSNKALPAPIEKTISKAKGQPREPQVYTLPPSRDELTKNQ | |
| | VSLSCAVKGFYPSDIAVEWESYGTEWSNYKTTPPVLDSDGSFFLVSKLTVTKE | |
| | EWQQGFVFSCSVMHEALHNHYTQKSLSLSPGK | |
| 94 | EVQLVESGGGLVQPGGSLRLSCAASGFTFTDYTMDWVRQAPGKGLEWVAD | Anti-HER2_DII fused |
| | VNPNSGGSIYNQRFKGRFTLSVDRSKNTLYLQMNSLRAEDTAVYYCARNLGP | to CH3C.35.23 with |
| | SFYFDYWGQGTLVTVSSASTKGPSVFPLAPSSKSTSGGTAALGCLVKDYFPEP | hole and LALA |
| | VTVSWNSGALTSGVHTFPAVLQSSGLYSLSSVVTVPSSSLGTQTYICNVNHKP | mutations |
| | SNTKVDKKVEPKSCDKTHTCPPCPAPEAAGGPSVFLFPPKPKDTLMISRTPEV | |
| | TCVVVDVSHEDPEVKFNWYVDGVEVHNAKTKPREEQYNSTYRVVSVLTVLH | |
| | QDWLNGKEYKCKVSNKALPAPIEKTISKAKGQPREPQVYTLPPSRDELTKNQ | |
| | VSLSCAVKGFYPSDIAVEWESYGTEWSNYKTTPPVLDSDGSFFLVSKLTVTKE | |
| | EWQQGFVFSCSVMHEALHNHYTQKSLSLSPGK | |
| 95 | EVQLVESGGGLVQPGGSLRLSCAASGFTFTDYTMDWVRQAPGKGLEWVAD | Anti-HER2_DII fused |
| | VNPNSGGSIYNQRFKGRFTLSVDRSKNTLYLQMNSLRAEDTAVYYCARNLGP | to CH3C.35.23 with |
| | SFYFDYWGQGTLVTVSSASTKGPSVFPLAPSSKSTSGGTAALGCLVKDYFPEP | hole and M428L and |
| | VTVSWNSGALTSGVHTFPAVLQSSGLYSLSSVVTVPSSSLGTQTYICNVNHKP | N434S mutations |
| | SNTKVDKKVEPKSCDKTHTCPPCPAPELLGGPSVFLFPPKPKDTLMISRTPEVT | |
| | CVVVDVSHEDPEVKFNWYVDGVEVHNAKTKPREEQYNSTYRVVSVLTVLH | |
| | QDWLNGKEYKCKVSNKALPAPIEKTISKAKGQPREPQVYTLPPSRDELTKNQ | |
| | VSLSCAVKGFYPSDIAVEWESYGTEWSNYKTTPPVLDSDGSFFLVSKLTVTKE | |
| | EWQQGFVFSCSVLHEALHSHYTQKSLSLSPGK | |
| 96 | EVQLVESGGGLVQPGGSLRLSCAASGFTFTDYTMDWVRQAPGKGLEWVAD | Anti-HER2_DII fused |
| | VNPNSGGSIYNQRFKGRFTLSVDRSKNTLYLQMNSLRAEDTAVYYCARNLGP | to CH3C.35.23 with |
| | SFYFDYWGQGTLVTVSSASTKGPSVFPLAPSSKSTSGGTAALGCLVKDYFPEP | hole, LALA, and |
| | VTVSWNSGALTSGVHTFPAVLQSSGLYSLSSVVTVPSSSLGTQTYICNVNHKP | M428L and N434S |
| | SNTKVDKKVEPKSCDKTHTCPPCPAPEAAGGPSVFLFPPKPKDTLMISRTPEV | mutations |
| | TCVVVDVSHEDPEVKFNWYVDGVEVHNAKTKPREEQYNSTYRVVSVLTVLH | |
| | QDWLNGKEYKCKVSNKALPAPIEKTISKAKGQPREPQVYTLPPSRDELTKNQ | |
| | VSLSCAVKGFYPSDIAVEWESYGTEWSNYKTTPPVLDSDGSFFLVSKLTVTKE | |
| | EWQQGFVFSCSVLHEALHSHYTQKSLSLSPGK | |
| 97 | EVQLVESGGGLVQPGGSLRLSCAASGFNIKDTYIHWVRQAPGKGLEWVARIY | Anti-HER2_DIV HC |
| | PTNGYTRYADSVKGRFTISADTSKNTAYLQMNSLRAEDTAVYYCSRWGGDG | with wild-type human |
| | FYAMDYWGQGTLVTVSSASTKGPSVFPLAPSSKSTSGGTAALGCLVKDYFPE | Fc |
| | PVTVSWNSGALTSGVHTFPAVLQSSGLYSLSSVVTVPSSSLGTQTYICNVNHK | |
| | PSNTKVDKKVEPKSCDKTHTCPPCPAPELLGGPSVFLFPPKPKDTLMISRTPEV | |
| | TCVVVDVSHEDPEVKFNWYVDGVEVHNAKTKPREEQYNSTYRVVSVLTVLH | |
| | QDWLNGKEYKCKVSNKALPAPIEKTISKAKGQPREPQVYTLPPSRDELTKNQ | |
| | VSLTCLVKGFYPSDIAVEWESNGQPENNYKTTPPVLDSDGSFFLYSKLTVDKS | |
| | RWQQGNVFSCSVMHEALHNHYTQKSLSLSPGK | |
| 98 | EVQLVESGGGLVQPGGSLRLSCAASGFTFTDYTMDWVRQAPGKGLEWVAD | Anti-HER2_DII_HC |
| | VNPNSGGSIYNQRFKGRFTLSVDRSKNTLYLQMNSLRAEDTAVYYCARNLGP | with wild-type human |
| | SFYFDYWGQGTLVTVSSASTKGPSVFPLAPSSKSTSGGTAALGCLVKDYFPEP | Fc |
| | VTVSWNSGALTSGVHTFPAVLQSSGLYSLSSVVTVPSSSLGTQTYICNVNHKP | |
| | SNTKVDKKVEPKSCDKTHTCPPCPAPELLGGPSVFLFPPKPKDTLMISRTPEVT | |
| | CVVVDVSHEDPEVKFNWYVDGVEVHNAKTKPREEQYNSTYRVVSVLTVLH | |
| | QDWLNGKEYKCKVSNKALPAPIEKTISKAKGQPREPQVYTLPPSRDELTKNQ | |
| | VSLTCLVKGFYPSDIAVEWESNGQPENNYKTTPPVLDSDGSFFLYSKLTVDKS | |
| | RWQQGNVFSCSVMHEALHNHYTQKSLSLSPGK | |
| 99 | APELLGGPSVFLFPPKPKDTLMISRTPEVTCVVVDVSHEDPEVKFNWYVDGVE | Wild-type human Fc |
| | VHNAKTKPREEQYNSTYRVVSVLTVLHQDWLNGKEYKCKVSNKALPAPIEK | sequence |
| | TISKAKGQPREPQVYTLPPSRDELTKNQVSLTCLVKGFYPSDIAVEWESNGQP | |
| | ENNYKTTPPVLDSDGSFFLYSKLTVDKSRWQQGNVFSCSVMHEALHNHYTQ | |
| | KSLSLSPGK | |
| 100 | APELLGGPSVFLFPPKPKDTLMISRTPEVTCVVVDVSHEDPEVKFNWYVDGVE | CH2 domain sequence |
| | VHNAKTKPREEQYNSTYRVVSVLTVLHQDWLNGKEYKCKVSNKALPAPIEK | |
| | TISKAK | |
| 101 | GQPREPQVYTLPPSRDELTKNQVSLTCLVKGFYPSDIAVEWESNGQPENNYKT | CH3 domain sequence |
| | TPPVLDSDGSFFLYSKLTVDKSRWQQGNVFSCSVMHEALHNHYTQKSLSLSP | |
| | GK | |
| 102 | MMDQARSAFSNLFGGEPLSYTRFSLARQVDGDNSHVEMKLAVDEEENADNN | Human transferrin |
| | TKANVTKPKRCSGSICYGTIAVIVFFLIGFMIGYLGYCKGVEPKTECERLAGTE | receptor protein 1 |
| | SPVREEPGEDFPAARRLYWDDLKRKLSEKLDSTDFTGTIKLLNENSYVPREAG | (TFR1) |
| | SQKDENLALYVENQFREFKLSKVWRDQHFVKIQVKDSAQNSVIIVDKNGRLV | |
| | YLVENPGGYVAYSKAATVTGKLVHANFGTKKDFEDLYTPVNGSIVIVRAGKI | |
| | TFAEKVANAESLNAIGVLIYMDQTKFPIVNAELSFFGHAHLGTGDPYTPGFPSF | |
| | NHTQFPPSRSSGLPNIPVQTISRAAAEKLFGNMEGDCPSDWKTDSTCRMVTSE | |
| | SKNVKLTVSNVLKEIKILNIFGVIKGFVEPDHYVVVGAQRDAWGPGAAKSGV | |
| | GTALLLKLAQMFSDMVLKDGFQPSRSIIFASWSAGDFGSVGATEWLEGYLSS | |
| | LHLKAFTYINLDKAVLGTSNFKVSASPLLYTLIEKTMQNVKHPVTGQFLYQDS | |
| | NVVASKVEKLTLDNAAFPFLAYSGIPAVSFCFCEDTDYPYLGTTMDTYKELIER | |
| | IPELNKVARAAAEVAGQFVIKLTHDVELNLDYERYNSQLLSFVRDLNQYRAD | |
| | IKEMGLSLQWLYSARGDFFRATSRLTTDFGNAEKTDRFVMKKLNDRVMRVE | |
| | YHFLSPYVSPKESPFRHVFWGSGSHTLPALLENLKLRKQNNGAFNETLFRNQL | |
| | ALATWTIQGAANALSGDVWDIDNEF | |
| 103 | NSVIIVDKNGRLVYLVENPGGYVAYSKAATVTGKLVHANFGTKKDFEDLYTP | Human TfR apical |
| | VNGSIVIVRAGKITFAEKVANAESLNAIGVLIYMDQTKFPIVNAELSFFGHAHL | domain |
| | GTGDPYTPGFPSFNHTQFPPSRSSGLPNIPVQTISRAAAEKLFGNMEGDCPSDW | |
| | KTDSTCRMVTSESKNVKLTVS | |
| 104 | EPKSCDKTHTCPPCP | Human IgG1 hinge |
| | | amino acid sequence |
| 105 | APELLGGPSVFLFPPKPKDTLMISRTPEVTCVVVDVSHEDPEVKFNWYVDGVE | Clone CH3C.35.23.3 |
| | VHNAKTKPREEQYNSTYRVVSVLTVLHQDWLNGKEYKCKVSNKALPAPIEK | with knob mutation |
| | TISKAKGQPREPQVYTLPPSRDELTKNQVSLWCLVKGFYPSDIAVEWESYGTE | |
| | WVNYKTTPPVLDSDGSFFLYSKLTVTKEEWQQGFVFSCSVMHEALHNHYTQ | |
| | KSLSLSPGK | |
| 106 | APEAAGGPSVFLFPPKPKDTLMISRTPEVTCVVVDVSHEDPEVKFNWYVDGV | Clone CH3C.35.23.3 |
| | EVHNAKTKPREEQYNSTYRVVSVLTVLHQDWLNGKEYKCKVSNKALPAPIE | with knob and LALA |
| | KTISKAKGQPREPQVYTLPPSRDELTKNQVSLWCLVKGFYPSDIAVEWESYGT | mutations |
| | EWVNYKTTPPVLDSDGSFFLYSKLTVTKEEWQQGFVFSCSVMHEALHNHYT | |
| | QKSLSLSPGK | |
| 107 | APEAAGGPSVFLFPPKPKDTLMISRTPEVTCVVVDVSHEDPEVKFNWYVDGV | Clone CH3C.35.23.3 |
| | EVHNAKTKPREEQYNSTYRVVSVLTVLHQDWLNGKEYKCKVSNKALGAPIE | with knob and |
| | KTISKAKGQPREPQVYTLPPSRDELTKNQVSLWCLVKGFYPSDIAVEWESYGT | LALAPG mutations |
| | EWVNYKTTPPVLDSDGSFFLYSKLTVTKEEWQQGFVFSCSVMHEALHNHYT | |
| | QKSLSLSPGK | |
| 108 | APELLGGPSVFLFPPKPKDTLYITREPEVTCVVVDVSHEDPEVKFNWYVDGVE | Clone CH3C.35.23.3 |
| | VHNAKTKPREEQYNSTYRVVSVLTVLHQDWLNGKEYKCKVSNKALPAPIEK | with knob and YTE |
| | TISKAKGQPREPQVYTLPPSRDELTKNQVSLWCLVKGFYPSDIAVEWESYGTE | mutations |
| | WVNYKTTPPVLDSDGSFFLYSKLTVTKEEWQQGFVFSCSVMHEALHNHYTQ | |
| | KSLSLSPGK | |
| 109 | APELLGGPSVFLFPPKPKDTLMISRTPEVTCVVVDVSHEDPEVKFNWYVDGVE | Clone CH3C.35.23.3 |
| | VHNAKTKPREEQYNSTYRVVSVLTVLHQDWLNGKEYKCKVSNKALPAPIEK | with knob and M198L |
| | TISKAKGQPREPQVYTLPPSRDELTKNQVSLWCLVKGFYPSDIAVEWESYGTE | and N204S mutations |
| | WVNYKTTPPVLDSDGSFFLYSKLTVTKEEWQQGFVFSCSVLHEALHSHYTQK | |
| | SLSLSPGK | |
| 110 | APEAAGGPSVFLFPPKPKDTLYITREPEVTCVVVDVSHEDPEVKFNWYVDGV | Clone CH3C.35.23.3 |
| | EVHNAKTKPREEQYNSTYRVVSVLTVLHQDWLNGKEYKCKVSNKALPAPIE | with knob, LALA, and |
| | KTISKAKGQPREPQVYTLPPSRDELTKNQVSLWCLVKGFYPSDIAVEWESYGT | YTE mutations |
| | EWVNYKTTPPVLDSDGSFFLYSKLTVTKEEWQQGFVFSCSVMHEALHNHYT | |
| | QKSLSLSPGK | |
| 111 | APEAAGGPSVFLFPPKPKDTLYITREPEVTCVVVDVSHEDPEVKFNWYVDGV | Clone CH3C.35.23.3 |
| | EVHNAKTKPREEQYNSTYRVVSVLTVLHQDWLNGKEYKCKVSNKALGAPIE | with knob, LALAPG, |
| | KTISKAKGQPREPQVYTLPPSRDELTKNQVSLWCLVKGFYPSDIAVEWESYGT | and YTE mutations |
| | EWVNYKTTPPVLDSDGSFFLYSKLTVTKEEWQQGFVFSCSVMHEALHNHYT | |
| | QKSLSLSPGK | |
| 112 | APEAAGGPSVFLFPPKPKDTLMISRTPEVTCVVVDVSHEDPEVKFNWYVDGV | Clone CH3C.35.23.3 |
| | EVHNAKTKPREEQYNSTYRVVSVLTVLHQDWLNGKEYKCKVSNKALPAPIE | with knob, LALA, and |
| | KTISKAKGQPREPQVYTLPPSRDELTKNQVSLWCLVKGFYPSDIAVEWESYGT | M198L and N204S |
| | EWVNYKTTPPVLDSDGSFFLYSKLTVTKEEWQQGFVFSCSVLHEALHSHYTQ | mutations |
| | KSLSLSPGK | |
| 113 | APEAAGGPSVFLFPPKPKDTLMISRTPEVTCVVVDVSHEDPEVKFNWYVDGV | Clone CH3C.35.23.3 |
| | EVHNAKTKPREEQYNSTYRVVSVLTVLHQDWLNGKEYKCKVSNKALGAPIE | with knob, LALAPG, |
| | KTISKAKGQPREPQVYTLPPSRDELTKNQVSLWCLVKGFYPSDIAVEWESYGT | and M198L and N204S |
| | EWVNYKTTPPVLDSDGSFFLYSKLTVTKEEWQQGFVFSCSVLHEALHSHYTQ | mutations |
| | KSLSLSPGK | |
| 114 | APELLGGPSVFLFPPKPKDTLMISRTPEVTCVVVDVSHEDPEVKFNWYVDGVE | Clone CH3C.3523.3 |
| | VHNAKTKPREEQYNSTYRVVSVLTVLHQDWLNGKEYKCKVSNKALPAPIEK | with hole mutations |
| | TISKAKGQPREPQVYTLPPSRDELTKNQVSLSCAVKGFYPSDIAVEWESYGTE | |
| | WVNYKTTPPVLDSDGSFFLVSKLTVTKEEWQQGFVFSCSVMHEALHNHYTQ | |
| | KSLSLSPGK | |
| 115 | APEAAGGPSVFLFPPKPKDTLMISRTPEVTCVVVDVSHEDPEVKFNWYVDGV | Clone CH3C.35.23.3 |
| | EVHNAKTKPREEQYNSTYRVVSVLTVLHQDWLNGKEYKCKVSNKALPAPIE | with hole and LALA |
| | KTISKAKGQPREPQVYTLPPSRDELTKNQVSLSCAVKGFYPSDIAVEWESYGT | mutations |
| | EWVNYKTTPPVLDSDGSFFLVSKLTVTKEEWQQGFVFSCSVMHEALHNHYT | |
| | QKSLSLSPGK | |
| 116 | APEAAGGPSVFLFPPKPKDTLMISRTPEVTCVVVDVSHEDPEVKFNWYVDGV | Clone CH3C.35.23.3 |
| | EVHNAKTKPREEQYNSTYRVVSVLTVLHQDWLNGKEYKCKVSNKALGAPIE | with hole and LALAPG |
| | KTISKAKGQPREPQVYTLPPSRDELTKNQVSLSCAVKGFYPSDIAVEWESYGT | mutations |
| | EWVNYKTTPPVLDSDGSFFLVSKLTVTKEEWQQGFVFSCSVMHEALHNHYT | |
| | QKSLSLSPGK | |
| 117 | APELLGGPSVFLFPPKPKDTLYITREPEVTCVVVDVSHEDPEVKFNWYVDGVE | Clone CH3C.35.23.3 |
| | VHNAKTKPREEQYNSTYRVVSVLTVLHQDWLNGKEYKCKVSNKALPAPIEK | with hole and YTE |
| | TISKAKGQPREPQVYTLPPSRDELTKNQVSLSCAVKGFYPSDIAVEWESYGTE | mutations |
| | WVNYKTTPPVLDSDGSFFLVSKLTVTKEEWQQGFVFSCSVMHEALHNHYTQ | |
| | KSLSLSPGK | |
| 118 | APELLGGPSVFLFPPKPKDTLMISRTPEVTCVVVDVSHEDPEVKFNWYVDGVE | Clone CH3C.35.23.3 |
| | VHNAKTKPREEQYNSTYRVVSVLTVLHQDWLNGKEYKCKVSNKALPAPIEK | with hole and M198L |
| | TISKAKGQPREPQVYTLPPSRDELTKNQVSLSCAVKGFYPSDIAVEWESYGTE | and N204S mutations |
| | WVNYKTTPPVLDSDGSFFLVSKLTVTKEEWQQGFVFSCSVLHEALHSHYTQK | |
| | SLSLSPGK | |
| 119 | APEAAGGPSVFLFPPKPKDTLYITREPEVTCVVVDVSHEDPEVKFNWYVDGV | Clone CH3C.35.23.3 |
| | EVHNAKTKPREEQYNSTYRVVSVLTVLHQDWLNGKEYKCKVSNKALPAPIE | with hole, LALA, and |
| | KTISKAKGQPREPQVYTLPPSRDELTKNQVSLSCAVKGFYPSDIAVEWESYGT | YTE mutations |
| | EWVNYKTTPPVLDSDGSFFLVSKLTVTKEEWQQGFVFSCSVMHEALHNHYT | |
| | QKSLSLSPGK | |
| 120 | APEAAGGPSVFLFPPKPKDTLYITREPEVTCVVVDVSHEDPEVKFNWYVDGV | Clone CH3C.35.23.3 |
| | EVHNAKTKPREEQYNSTYRVVSVLTVLHQDWLNGKEYKCKVSNKALGAPIE | with hole, LALAPG, |
| | KTISKAKGQPREPQVYTLPPSRDELTKNQVSLSCAVKGFYPSDIAVEWESYGT | and YTE mutations |
| | EWVNYKTTPPVLDSDGSFFLVSKLTVTKEEWQQGFVFSCSVMHEALHNHYT | |
| | QKSLSLSPGK | |
| 121 | APEAAGGPSVFLFPPKPKDTLMISRTPEVTCVVVDVSHEDPEVKFNWYVDGV | Clone CH3C.35.23.3 |
| | EVHNAKTKPREEQYNSTYRVVSVLTVLHQDWLNGKEYKCKVSNKALPAPIE | with hole, LALA, and |
| | KTISKAKGQPREPQVYTLPPSRDELTKNQVSLSCAVKGFYPSDIAVEWESYGT | M198L and N204S |
| | EWVNYKTTPPVLDSDGSFFLVSKLTVTKEEWQQGFVFSCSVLHEALHSHYTQ | mutations |
| | KSLSLSPGK | |
| 122 | APEAAGGPSVFLFPPKPKDTLMISRTPEVTCVVVDVSHEDPEVKFNWYVDGV | Clone CH3C.35.23.3 |
| | EVHNAKTKPREEQYNSTYRVVSVLTVLHQDWLNGKEYKCKVSNKALGAPIE | with hole, LALAPG, |
| | KTISKAKGQPREPQVYTLPPSRDELTKNQVSLSCAVKGFYPSDIAVEWESYGT | and M198L and N204S |
| | EWVNYKTTPPVLDSDGSFFLVSKLTVTKEEWQQGFVFSCSVLHEALHSHYTQ | mutations |
| | KSLSLSPGK | |
| 123 | APELLGGPSVFLFPPKPKDTLMISRTPEVTCVVVDVSHEDPEVKFNWYVDGVE | Clone CH3C.35.23.4 |
| | VHNAKTKPREEQYNSTYRVVSVLTVLHQDWLNGKEYKCKVSNKALPAPIEK | with knob mutation |
| | TISKAKGQPREPQVYTLPPSRDELTKNQVSLWCLVKGFYPSDIAVEWESYGTE | |
| | WSNYKTTPPVLDSDGSFFLYSKLTVSKEEWQQGFVFSCSVMHEALHNHYTQ | |
| | KSLSLSPGK | |
| 124 | APEAAGGPSVFLFPPKPKDTLMISRTPEVTCVVVDVSHEDPEVKFNWYVDGV | Clone CH3C.35.23.4 |
| | EVHNAKTKPREEQYNSTYRVVSVLTVLHQDWLNGKEYKCKVSNKALPAPIE | with knob and LALA |
| | KTISKAKGQPREPQVYTLPPSRDELTKNQVSLWCLVKGFYPSDIAVEWESYGT | mutations |
| | EWSNYKTTPPVLDSDGSFFLYSKLTVSKEEWQQGFVFSCSVMHEALHNHYTQ | |
| | KSLSLSPGK | |
| 125 | APEAAGGPSVFLFPPKPKDTLMISRTPEVTCVVVDVSHEDPEVKFNWYVDGV | Clone CH3C.35.23.4 |
| | EVHNAKTKPREEQYNSTYRVVSVLTVLHQDWLNGKEYKCKVSNKALGAPIE | with knob and |
| | KTISKAKGQPREPQVYTLPPSRDELTKNQVSLWCLVKGFYPSDIAVEWESYGT | LALAPG mutations |
| | EWSNYKTTPPVLDSDGSFFLYSKLTVSKEEWQQGFVFSCSVMHEALHNHYTQ | |
| | KSLSLSPGK | |
| 126 | APELLGGPSVFLFPPKPKDTLYITREPEVTCVVVDVSHEDPEVKFNWYVDGVE | Clone CH3C.35.23.4 |
| | VHNAKTKPREEQYNSTYRVVSVLTVLHQDWLNGKEYKCKVSNKALPAPIEK | with knob and YTE |
| | TISKAKGQPREPQVYTLPPSRDELTKNQVSLWCLVKGFYPSDIAVEWESYGTE | mutations |
| | WSNYKTTPPVLDSDGSFFLYSKLTVSKEEWQQGFVFSCSVMHEALHNHYTQ | |
| | KSLSLSPGK | |
| 127 | APELLGGPSVFLFPPKPKDTLMISRTPEVTCVVVDVSHEDPEVKFNWYVDGVE | Clone CH3C.35.23.4 |
| | VHNAKTKPREEQYNSTYRVVSVLTVLHQDWLNGKEYKCKVSNKALPAPIEK | with knob and M198L |
| | TISKAKGQPREPQVYTLPPSRDELTKNQVSLWCLVKGFYPSDIAVEWESYGTE | and N204S mutations |
| | WSNYKTTPPVLDSDGSFFLYSKLTVSKEEWQQGFVFSCSVLHEALHSHYTQK | |
| | SLSLSPGK | |
| 128 | APEAAGGPSVFLFPPKPKDTLYITREPEVTCVVVDVSHEDPEVKFNWYVDGV | Clone CH3C.35.23.4 |
| | EVHNAKTKPREEQYNSTYRVVSVLTVLHQDWLNGKEYKCKVSNKALPAPIE | with knob, LALA, and |
| | KTISKAKGQPREPQVYTLPPSRDELTKNQVSLWCLVKGFYPSDIAVEWESYGT | YTE mutations |
| | EWSNYKTTPPVLDSDGSFFLYSKLTVSKEEWQQGFVFSCSVMHEALHNHYTQ | |
| | KSLSLSPGK | |
| 129 | APEAAGGPSVFLFPPKPKDTLYITREPEVTCVVVDVSHEDPEVKFNWYVDGV | Clone CH3C.35.23.4 |
| | EVHNAKTKPREEQYNSTYRVVSVLTVLHQDWLNGKEYKCKVSNKALGAPIE | with knob, LALAPG, |
| | KTISKAKGQPREPQVYTLPPSRDELTKNQVSLWCLVKGFYPSDIAVEWESYGT | and YTE mutations |
| | EWSNYKTTPPVLDSDGSFFLYSKLTVSKEEWQQGFVFSCSVMHEALHNHYTQ | |
| | KSLSLSPGK | |
| 130 | APEAAGGPSVFLFPPKPKDTLMISRTPEVTCVVVDVSHEDPEVKFNWYVDGV | Clone CH3C.35.23.4 |
| | EVHNAKTKPREEQYNSTYRVVSVLTVLHQDWLNGKEYKCKVSNKALPAPIE | with knob, LALA, and |
| | KTISKAKGQPREPQVYTLPPSRDELTKNQVSLWCLVKGFYPSDIAVEWESYGT | M198L and N204S |
| | EWSNYKTTPPVLDSDGSFFLYSKLTVSKEEWQQGFVFSCSVLHEALHSHYTQ | mutations |
| | KSLSLSPGK | |
| 131 | APEAAGGPSVFLFPPKPKDTLMISRTPEVTCVVVDVSHEDPEVKFNWYVDGV | Clone CH3C.35.23.4 |
| | EVHNAKTKPREEQYNSTYRVVSVLTVLHQDWLNGKEYKCKVSNKALGAPIE | with knob, LALAPG, |
| | KTISKAKGQPREPQVYTLPPSRDELTKNQVSLWCLVKGFYPSDIAVEWESYGT | and M198L and N204S |
| | EWSNYKTTPPVLDSDGSFFLYSKLTVSKEEWQQGFVFSCSVLHEALHSHYTQ | mutations |
| | KSLSLSPGK | |
| 132 | APELLGGPSVFLFPPKPKDTLMISRTPEVTCVVVDVSHEDPEVKFNWYVDGVE | Clone CH3C.35.23.4 |
| | VHNAKTKPREEQYNSTYRVVSVLTVLHQDWLNGKEYKCKVSNKALPAPIEK | with hole mutations |
| | TISKAKGQPREPQVYTLPPSRDELTKNQVSLSCAVKGFYPSDIAVEWESYGTE | |
| | WSNYKTTPPVLDSDGSFFLVSKLTVSKEEWQQGFVFSCSVMHEALHNHYTQ | |
| | KSLSLSPGK | |
| 133 | APEAAGGPSVFLFPPKPKDTLMISRTPEVTCVVVDVSHEDPEVKFNWYVDGV | Clone CH3C.35.23.4 |
| | EVHNAKTKPREEQYNSTYRVVSVLTVLHQDWLNGKEYKCKVSNKALPAPIE | with hole and LALA |
| | KTISKAKGQPREPQVYTLPPSRDELTKNQVSLSCAVKGFYPSDIAVEWESYGT | mutations |
| | EWSNYKTTPPVLDSDGSFFLVSKLTVSKEEWQQGFVFSCSVMHEALHNHYTQ | |
| | KSLSLSPGK | |
| 134 | APEAAGGPSVFLFPPKPKDTLMISRTPEVTCVVVDVSHEDPEVKFNWYVDGV | Clone CH3C.35.23.4 |
| | EVHNAKTKPREEQYNSTYRVVSVLTVLHQDWLNGKEYKCKVSNKALGAPIE | with hole and LALAPG |
| | KTISKAKGQPREPQVYTLPPSRDELTKNQVSLSCAVKGFYPSDIAVEWESYGT | mutations |
| | EWSNYKTTPPVLDSDGSFFLVSKLTVSKEEWQQGFVFSCSVMHEALHNHYTQ | |
| | KSLSLSPGK | |
| 135 | APELLGGPSVFLFPPKPKDTLYITREPEVTCVVVDVSHEDPEVKFNWYVDGVE | Clone CH3C.35.23.4 |
| | VHNAKTKPREEQYNSTYRVVSVLTVLHQDWLNGKEYKCKVSNKALPAPIEK | with hole and YTE |
| | TISKAKGQPREPQVYTLPPSRDELTKNQVSLSCAVKGFYPSDIAVEWESYGTE | mutations |
| | WSNYKTTPPVLDSDGSFFLVSKLTVSKEEWQQGFVFSCSVMHEALHNHYTQ | |
| | KSLSLSPGK | |
| 136 | APELLGGPSVFLFPPKPKDTLMISRTPEVTCVVVDVSHEDPEVKFNWYVDGVE | Clone CH3C.35.23.4 |
| | VHNAKTKPREEQYNSTYRVVSVLTVLHQDWLNGKEYKCKVSNKALPAPIEK | with hole and M198L |
| | TISKAKGQPREPQVYTLPPSRDELTKNQVSLSCAVKGFYPSDIAVEWESYGTE | and N204S mutations |
| | WSNYKTTPPVLDSDGSFFLVSKLTVSKEEWQQGFVFSCSVLHEALHSHYTQK | |
| | SLSLSPGK | |
| 137 | APEAAGGPSVFLFPPKPKDTLYITREPEVTCVVVDVSHEDPEVKFNWYVDGV | Clone CH3C.35.23.4 |
| | EVHNAKTKPREEQYNSTYRVVSVLTVLHQDWLNGKEYKCKVSNKALPAPIE | with hole, LALA, and |
| | KTISKAKGQPREPQVYTLPPSRDELTKNQVSLSCAVKGFYPSDIAVEWESYGT | YTE mutations |
| | EWSNYKTTPPVLDSDGSFFLVSKLTVSKEEWQQGFVFSCSVMHEALHNHYTQ | |
| | KSLSLSPGK | |
| 138 | APEAAGGPSVFLFPPKPKDTLYITREPEVTCVVVDVSHEDPEVKFNWYVDGV | Clone CH3C.35.23.4 |
| | EVHNAKTKPREEQYNSTYRVVSVLTVLHQDWLNGKEYKCKVSNKALGAPIE | with hole, LALAPG, |
| | KTISKAKGQPREPQVYTLPPSRDELTKNQVSLSCAVKGFYPSDIAVEWESYGT | and YTE mutations |
| | EWSNYKTTPPVLDSDGSFFLVSKLTVSKEEWQQGFVFSCSVMHEALHNHYTQ | |
| | KSLSLSPGK | |
| 139 | APEAAGGPSVFLFPPKPKDTLMISRTPEVTCVVVDVSHEDPEVKFNWYVDGV | Clone CH3C.35.23.4 |
| | EVHNAKTKPREEQYNSTYRVVSVLTVLHQDWLNGKEYKCKVSNKALPAPIE | with hole, LALA, and |
| | KTISKAKGQPREPQVYTLPPSRDELTKNQVSLSCAVKGFYPSDIAVEWESYGT | M198L and N204S |
| | EWSNYKTTPPVLDSDGSFFLVSKLTVSKEEWQQGFVFSCSVLHEALHSHYTQ | mutations |
| | KSLSLSPGK | |
| 140 | APEAAGGPSVFLFPPKPKDTLMISRTPEVTCVVVDVSHEDPEVKFNWYVDGV | Clone CH3C.35.23.4 |
| | EVHNAKTKPREEQYNSTYRVVSVLTVLHQDWLNGKEYKCKVSNKALGAPIE | with hole, LALAPG, |
| | KTISKAKGQPREPQVYTLPPSRDELTKNQVSLSCAVKGFYPSDIAVEWESYGT | and M198L and N204S |
| | EWSNYKTTPPVLDSDGSFFLVSKLTVSKEEWQQGFVFSCSVLHEALHSHYTQ | mutations |
| | KSLSLSPGK | |
| 141 | APELLGGPSVFLFPPKPKDTLMISRTPEVTCVVVDVSHEDPEVKFNWYVDGVE | Clone CH3C.35.23 |
| | VHNAKTKPREEQYNSTYRVVSVLTVLHQDWLNGKEYKCKVSNKALPAPIEK | with knob mutation |
| | TISKAKGQPREPQVYTLPPSRDELTKNQVSLWCLVKGFYPSDIAVEWESYGTE | |
| | WSNYKTTPPVLDSDGSFFLYSKLTVTKEEWQQGFVFSCSVMHEALHNHYTQ | |
| | KSLSLSPGK | |
| 142 | APEAAGGPSVFLFPPKPKDTLMISRTPEVTCVVVDVSHEDPEVKFNWYVDGV | Clone CH3C.35.23 |
| | EVHNAKTKPREEQYNSTYRVVSVLTVLHQDWLNGKEYKCKVSNKALPAPIE | with knob and LALA |
| | KTISKAKGQPREPQVYTLPPSRDELTKNQVSLWCLVKGFYPSDIAVEWESYGT | mutations |
| | EWSNYKTTPPVLDSDGSFFLYSKLTVTKEEWQQGFVFSCSVMHEALHNHYTQ | |
| | KSLSLSPGK | |
| 143 | APEAAGGPSVFLFPPKPKDTLMISRTPEVTCVVVDVSHEDPEVKFNWYVDGV | Clone CH3C.35.23 |
| | EVHNAKTKPREEQYNSTYRVVSVLTVLHQDWLNGKEYKCKVSNKALGAPIE | with knob and |
| | KTISKAKGQPREPQVYTLPPSRDELTKNQVSLWCLVKGFYPSDIAVEWESYGT | LALAPG mutations |
| | EWSNYKTTPPVLDSDGSFFLYSKLTVTKEEWQQGFVFSCSVMHEALHNHYTQ | |
| | KSLSLSPGK | |
| 144 | APELLGGPSVFLFPPKPKDTLYITREPEVTCVVVDVSHEDPEVKFNWYVDGVE | Clone CH3C.35.23 |
| | VHNAKTKPREEQYNSTYRVVSVLTVLHQDWLNGKEYKCKVSNKALPAPIEK | with knob and YTE |
| | TISKAKGQPREPQVYTLPPSRDELTKNQVSLWCLVKGFYPSDIAVEWESYGTE | mutations |
| | WSNYKTTPPVLDSDGSFFLYSKLTVTKEEWQQGFVFSCSVMHEALHNHYTQ | |
| | KSLSLSPGK | |
| 145 | APELLGGPSVFLFPPKPKDTLMISRTPEVTCVVVDVSHEDPEVKFNWYVDGVE | Clone CH3C.35.23 |
| | VHNAKTKPREEQYNSTYRVVSVLTVLHQDWLNGKEYKCKVSNKALPAPIEK | with knob and M198L |
| | TISKAKGQPREPQVYTLPPSRDELTKNQVSLWCLVKGFYPSDIAVEWESYGTE | and N204S mutations |
| | WSNYKTTPPVLDSDGSFFLYSKLTVTKEEWQQGFVFSCSVLHEALHSHYTQK | |
| | SLSLSPGK | |
| 146 | APEAAGGPSVFLFPPKPKDTLYITREPEVTCVVVDVSHEDPEVKFNWYVDGV | Clone CH3C.35.23 |
| | EVHNAKTKPREEQYNSTYRVVSVLTVLHQDWLNGKEYKCKVSNKALPAPIE | with knob, LALA, and |
| | KTISKAKGQPREPQVYTLPPSRDELTKNQVSLWCLVKGFYPSDIAVEWESYGT | YTE mutations |
| | EWSNYKTTPPVLDSDGSFFLYSKLTVTKEEWQQGFVFSCSVMHEALHNHYTQ | |
| | KSLSLSPGK | |
| 147 | APEAAGGPSVFLFPPKPKDTLYITREPEVTCVVVDVSHEDPEVKFNWYVDGV | Clone CH3C.35.23 |
| | EVHNAKTKPREEQYNSTYRVVSVLTVLHQDWLNGKEYKCKVSNKALGAPIE | with knob, LALAPG, |
| | KTISKAKGQPREPQVYTLPPSRDELTKNQVSLWCLVKGFYPSDIAVEWESYGT | and YTE mutations |
| | EWSNYKTTPPVLDSDGSFFLYSKLTVTKEEWQQGFVFSCSVMHEALHNHYTQ | |
| | KSLSLSPGK | |
| 148 | APEAAGGPSVFLFPPKPKDTLMISRTPEVTCVVVDVSHEDPEVKFNWYVDGV | Clone CH3C.35.23 |
| | EVHNAKTKPREEQYNSTYRVVSVLTVLHQDWLNGKEYKCKVSNKALPAPIE | with knob, LALA, and |
| | KTISKAKGQPREPQVYTLPPSRDELTKNQVSLWCLVKGFYPSDIAVEWESYGT | M198L and N204S |
| | EWSNYKTTPPVLDSDGSFFLYSKLTVTKEEWQQGFVFSCSVLHEALHSHYTQ | mutations |
| | KSLSLSPGK | |
| 149 | APEAAGGPSVFLFPPKPKDTLMISRTPEVTCVVVDVSHEDPEVKFNWYVDGV | Clone CH3C.35.23 |
| | EVHNAKTKPREEQYNSTYRVVSVLTVLHQDWLNGKEYKCKVSNKALGAPIE | with knob, LALAPG, |
| | KTISKAKGQPREPQVYTLPPSRDELTKNQVSLWCLVKGFYPSDIAVEWESYGT | and M198L and N204S |
| | EWSNYKTTPPVLDSDGSFFLYSKLTVTKEEWQQGFVFSCSVLHEALHSHYTQ | mutations |
| | KSLSLSPGK | |
| 150 | APELLGGPSVFLFPPKPKDTLMISRTPEVTCVVVDVSHEDPEVKFNWYVDGVE | Clone CH3C.35.23 |
| | VHNAKTKPREEQYNSTYRVVSVLTVLHQDWLNGKEYKCKVSNKALPAPIEK | with hole mutations |
| | TISKAKGQPREPQVYTLPPSRDELTKNQVSLSCAVKGFYPSDIAVEWESYGTE | |
| | WSNYKTTPPVLDSDGSFFLVSKLTVTKEEWQQGFVFSCSVMHEALHNHYTQ | |
| | KSLSLSPGK | |
| 151 | APEAAGGPSVFLFPPKPKDTLMISRTPEVTCVVVDVSHEDPEVKFNWYVDGV | Clone CH3C.35.23 |
| | EVHNAKTKPREEQYNSTYRVVSVLTVLHQDWLNGKEYKCKVSNKALPAPIE | with hole and LALA |
| | KTISKAKGQPREPQVYTLPPSRDELTKNQVSLSCAVKGFYPSDIAVEWESYGT | mutations |
| | EWSNYKTTPPVLDSDGSFFLVSKLTVTKEEWQQGFVFSCSVMHEALHNHYTQ | |
| | KSLSLSPGK | |
| 152 | APEAAGGPSVFLFPPKPKDTLMISRTPEVTCVVVDVSHEDPEVKFNWYVDGV | Clone CH3C.35.23 |
| | EVHNAKTKPREEQYNSTYRVVSVLTVLHQDWLNGKEYKCKVSNKALGAPIE | with hole and LALAPG |
| | KTISKAKGQPREPQVYTLPPSRDELTKNQVSLSCAVKGFYPSDIAVEWESYGT | mutations |
| | EWSNYKTTPPVLDSDGSFFLVSKLTVTKEEWQQGFVFSCSVMHEALHNHYTQ | |
| | KSLSLSPGK | |
| 153 | APELLGGPSVFLFPPKPKDTLYITREPEVTCVVVDVSHEDPEVKFNWYVDGVE | Clone CH3C.35.23 |
| | VHNAKTKPREEQYNSTYRVVSVLTVLHQDWLNGKEYKCKVSNKALPAPIEK | with hole and YTE |
| | TISKAKGQPREPQVYTLPPSRDELTKNQVSLSCAVKGFYPSDIAVEWESYGTE | mutations |
| | WSNYKTTPPVLDSDGSFFLVSKLTVTKEEWQQGFVFSCSVMHEALHNHYTQ | |
| | KSLSLSPGK | |
| 154 | APELLGGPSVFLFPPKPKDTLMISRTPEVTCVVVDVSHEDPEVKFNWYVDGVE | Clone CH3C.35.23 |
| | VHNAKTKPREEQYNSTYRVVSVLTVLHQDWLNGKEYKCKVSNKALPAPIEK | with hole and M198L |
| | TISKAKGQPREPQVYTLPPSRDELTKNQVSLSCAVKGFYPSDIAVEWESYGTE | and N204S mutations |
| | WSNYKTTPPVLDSDGSFFLVSKLTVTKEEWQQGFVFSCSVLHEALHSHYTQK | |
| | SLSLSPGK | |
| 155 | APEAAGGPSVFLFPPKPKDTLYITREPEVTCVVVDVSHEDPEVKFNWYVDGV | Clone CH3C.35.23 |
| | EVHNAKTKPREEQYNSTYRVVSVLTVLHQDWLNGKEYKCKVSNKALPAPIE | with hole, LALA, and |
| | KTISKAKGQPREPQVYTLPPSRDELTKNQVSLSCAVKGFYPSDIAVEWESYGT | YTE mutations |
| | EWSNYKTTPPVLDSDGSFFLVSKLTVTKEEWQQGFVFSCSVMHEALHNHYTQ | |
| | KSLSLSPGK | |
| 156 | APEAAGGPSVFLFPPKPKDTLYITREPEVTCVVVDVSHEDPEVKFNWYVDGV | Clone CH3C.35.23 |
| | EVHNAKTKPREEQYNSTYRVVSVLTVLHQDWLNGKEYKCKVSNKALGAPIE | with hole, LALAPG, |
| | KTISKAKGQPREPQVYTLPPSRDELTKNQVSLSCAVKGFYPSDIAVEWESYGT | and YTE mutations |
| | EWSNYKTTPPVLDSDGSFFLVSKLTVTKEEWQQGFVFSCSVMHEALHNHYTQ | |
| | KSLSLSPGK | |
| 157 | APEAAGGPSVFLFPPKPKDTLMISRTPEVTCVVVDVSHEDPEVKFNWYVDGV | Clone CH3C.35.23 |
| | EVHNAKTKPREEQYNSTYRVVSVLTVLHQDWLNGKEYKCKVSNKALPAPIE | with hole, LALA, and |
| | KTISKAKGQPREPQVYTLPPSRDELTKNQVSLSCAVKGFYPSDIAVEWESYGT | M198L and N204S |
| | EWSNYKTTPPVLDSDGSFFLVSKLTVTKEEWQQGFVFSCSVLHEALHSHYTQ | mutations |
| | KSLSLSPGK | |
| 158 | APEAAGGPSVFLFPPKPKDTLMISRTPEVTCVVVDVSHEDPEVKFNWYVDGV | Clone CH3C.35.23 |
| | EVHNAKTKPREEQYNSTYRVVSVLTVLHQDWLNGKEYKCKVSNKALGAPIE | with ole, h LALAP G, |
| | KTISKAKGQPREPQVYTLPPSRDELTKNQVSLSCAVKGFYPSDIAVEWESYGT | and M198L and N204S |
| | EWSNYKTTPPVLDSDGSFFLVSKLTVTKEEWQQGFVFSCSVLHEALHSHYTQ | mutations |
| | KSLSLSPGK | |
| 159 | APELLGGPSVFLFPPKPKDTLMISRTPEVTCVVVDVSHEDPEVKFNWYVDGVE | Clone CH3C.35.23.1.1 |
| | VHNAKTKPREEQYNSTYRVVSVLTVLHQDWLNGKEYKCKVSNKALPAPIEK | with knob mutation |
| | TISKAKGQPREPQVYTLPPSRDELTKNQVSLWCLVKGFYPSDIAVEWESFGTE | |
| | WSNYKTTPPVLDSDGSFFLYSKLTVSKEEWQQGFVFSCSVMHEALHNHYTQ | |
| | KSLSLSPGK | |
| 160 | APEAAGGPSVFLFPPKPKDTLMISRTPEVTCVVVDVSHEDPEVKFNWYVDGV | Clone CH3C.35.23.1.1 |
| | EVHNAKTKPREEQYNSTYRVVSVLTVLHQDWLNGKEYKCKVSNKALPAPIE | with knob and LALA |
| | KTISKAKGQPREPQVYTLPPSRDELTKNQVSLWCLVKGFYPSDIAVEWESFGT | mutations |
| | EWSNYKTTPPVLDSDGSFFLYSKLTVSKEEWQQGFVFSCSVMHEALHNHYTQ | |
| | KSLSLSPGK | |
| 161 | APEAAGGPSVFLFPPKPKDTLMISRTPEVTCVVVDVSHEDPEVKFNWYVDGV | Clone CH3C.35.23.1.1 |
| | EVHNAKTKPREEQYNSTYRVVSVLTVLHQDWLNGKEYKCKVSNKALGAPIE | with knob and |
| | KTISKAKGQPREPQVYTLPPSRDELTKNQVSLWCLVKGFYPSDIAVEWESFGT | LALAPG mutations |
| | EWSNYKTTPPVLDSDGSFFLYSKLTVSKEEWQQGFVFSCSVMHEALHNHYTQ | |
| | KSLSLSPGK | |
| 162 | APELLGGPSVFLFPPKPKDTLYITREPEVTCVVVDVSHEDPEVKFNWYVDGVE | Clone CH3C.35.23.1.1 |
| | VHNAKTKPREEQYNSTYRVVSVLTVLHQDWLNGKEYKCKVSNKALPAPIEK | with knob and YTE |
| | TISKAKGQPREPQVYTLPPSRDELTKNQVSLWCLVKGFYPSDIAVEWESFGTE | mutations |
| | WSNYKTTPPVLDSDGSFFLYSKLTVSKEEWQQGFVFSCSVMHEALHNHYTQ | |
| | KSLSLSPGK | |
| 163 | APELLGGPSVFLFPPKPKDTLMISRTPEVTCVVVDVSHEDPEVKFNWYVDGVE | Clone CH3C.35.23.1.1 |
| | VHNAKTKPREEQYNSTYRVVSVLTVLHQDWLNGKEYKCKVSNKALPAPIEK | with knob and M198L |
| | TISKAKGQPREPQVYTLPPSRDELTKNQVSLWCLVKGFYPSDIAVEWESFGTE | and N204S mutations |
| | WSNYKTTPPVLDSDGSFFLYSKLTVSKEEWQQGFVFSCSVLHEALHSHYTQK | |
| | SLSLSPGK | |
| 164 | APEAAGGPSVFLFPPKPKDTLYITREPEVTCVVVDVSHEDPEVKFNWYVDGV | Clone CH3C.35.23.1.1 |
| | EVHNAKTKPREEQYNSTYRVVSVLTVLHQDWLNGKEYKCKVSNKALPAPIE | with knob, LALA, and |
| | KTISKAKGQPREPQVYTLPPSRDELTKNQVSLWCLVKGFYPSDIAVEWESFGT | YTE mutations |
| | EWSNYKTTPPVLDSDGSFFLYSKLTVSKEEWQQGFVFSCSVMHEALHNHYTQ | |
| | KSLSLSPGK | |
| 165 | APEAAGGPSVFLFPPKPKDTLYITREPEVTCVVVDVSHEDPEVKFNWYVDGV | Clone CH3C.35.23.1.1 |
| | EVHNAKTKPREEQYNSTYRVVSVLTVLHQDWLNGKEYKCKVSNKALGAPIE | with knob, LALAPG, |
| | KTISKAKGQPREPQVYTLPPSRDELTKNQVSLWCLVKGFYPSDIAVEWESFGT | and YTE mutations |
| | EWSNYKTTPPVLDSDGSFFLYSKLTVSKEEWQQGFVFSCSVMHEALHNHYTQ | |
| | KSLSLSPGK | |
| 166 | APEAAGGPSVFLFPPKPKDTLMISRTPEVTCVVVDVSHEDPEVKFNWYVDGV | Clone CH3C.35.23.1.1 |
| | EVHNAKTKPREEQYNSTYRVVSVLTVLHQDWLNGKEYKCKVSNKALPAPIE | with knob, LALA, and |
| | KTISKAKGQPREPQVYTLPPSRDELTKNQVSLWCLVKGFYPSDIAVEWESFGT | M198L and N204S |
| | EWSNYKTTPPVLDSDGSFFLYSKLTVSKEEWQQGFVFSCSVLHEALHSHYTQ | mutations |
| | KSLSLSPGK | |
| 167 | APEAAGGPSVFLFPPKPKDTLMISRTPEVTCVVVDVSHEDPEVKFNWYVDGV | Clone CH3C.35.23.1.1 |
| | EVHNAKTKPREEQYNSTYRVVSVLTVLHQDWLNGKEYKCKVSNKALGAPIE | with knob, LALAPG, |
| | KTISKAKGQPREPQVYTLPPSRDELTKNQVSLWCLVKGFYPSDIAVEWESFGT | and M198L and N204S |
| | EWSNYKTTPPVLDSDGSFFLYSKLTVSKEEWQQGFVFSCSVLHEALHSHYTQ | mutations |
| | KSLSLSPGK | |
| 168 | APELLGGPSVFLFPPKPKDTLMISRTPEVTCVVVDVSHEDPEVKFNWYVDGVE | Clone CH3C.35.23.1.1 |
| | VHNAKTKPREEQYNSTYRVVSVLTVLHQDWLNGKEYKCKVSNKALPAPIEK | with hole mutations |
| | TISKAKGQPREPQVYTLPPSRDELTKNQVSLSCAVKGFYPSDIAVEWESFGTE | |
| | WSNYKTTPPVLDSDGSFFLVSKLTVSKEEWQQGFVFSCSVMHEALHNHYTQ | |
| | KSLSLSPGK | |
| 169 | APEAAGGPSVFLFPPKPKDTLMISRTPEVTCVVVDVSHEDPEVKFNWYVDGV | Clone CH3C.35.23.1.1 |
| | EVHNAKTKPREEQYNSTYRVVSVLTVLHQDWLNGKEYKCKVSNKALPAPIE | with hole and LALA |
| | KTISKAKGQPREPQVYTLPPSRDELTKNQVSLSCAVKGFYPSDIAVEWESFGT | mutations |
| | EWSNYKTTPPVLDSDGSFFLVSKLTVSKEEWQQGFVFSCSVMHEALHNHYTQ | |
| | KSLSLSPGK | |
| 170 | APEAAGGPSVFLFPPKPKDTLMISRTPEVTCVVVDVSHEDPEVKFNWYVDGV | Clone CH3C.35.23.1.1 |
| | EVHNAKTKPREEQYNSTYRVVSVLTVLHQDWLNGKEYKCKVSNKALGAPIE | with hole and LALAPG |
| | KTISKAKGQPREPQVYTLPPSRDELTKNQVSLSCAVKGFYPSDIAVEWESFGT | mutations |
| | EWSNYKTTPPVLDSDGSFFLVSKLTVSKEEWQQGFVFSCSVMHEALHNHYTQ | |
| | KSLSLSPGK | |
| 171 | APELLGGPSVFLFPPKPKDTLYITREPEVTCVVVDVSHEDPEVKFNWYVDGVE | Clone CH3C.35.23.1.1 |
| | VHNAKTKPREEQYNSTYRVVSVLTVLHQDWLNGKEYKCKVSNKALPAPIEK | with hole and YTE |
| | TISKAKGQPREPQVYTLPPSRDELTKNQVSLSCAVKGFYPSDIAVEWESFGTE | mutations |
| | WSNYKTTPPVLDSDGSFFLVSKLTVSKEEWQQGFVFSCSVMHEALHNHYTQ | |
| | KSLSLSPGK | |
| 172 | APELLGGPSVFLFPPKPKDTLMISRTPEVTCVVVDVSHEDPEVKFNWYVDGVE | Clone CH3C.35.23.1.1 |
| | VHNAKTKPREEQYNSTYRVVSVLTVLHQDWLNGKEYKCKVSNKALPAPIEK | with hole and M198L |
| | TISKAKGQPREPQVYTLPPSRDELTKNQVSLSCAVKGFYPSDIAVEWESFGTE | and N204S mutations |
| | WSNYKTTPPVLDSDGSFFLVSKLTVSKEEWQQGFVFSCSVLHEALHSHYTQK | |
| | SLSLSPGK | |
| 173 | APEAAGGPSVFLFPPKPKDTLYITREPEVTCVVVDVSHEDPEVKFNWYVDGV | Clone CH3C.35.23.1.1 |
| | EVHNAKTKPREEQYNSTYRVVSVLTVLHQDWLNGKEYKCKVSNKALPAPIE | with hole, LALA, and |
| | KTISKAKGQPREPQVYTLPPSRDELTKNQVSLSCAVKGFYPSDIAVEWESFGT | YTE mutations |
| | EWSNYKTTPPVLDSDGSFFLVSKLTVSKEEWQQGFVFSCSVMHEALHNHYTQ | |
| | KSLSLSPGK | |
| 174 | APEAAGGPSVFLFPPKPKDTLYITREPEVTCVVVDVSHEDPEVKFNWYVDGV | Clone CH3C.35.23.1.1 |
| | EVHNAKTKPREEQYNSTYRVVSVLTVLHQDWLNGKEYKCKVSNKALGAPIE | with hole, LALAPG, |
| | KTISKAKGQPREPQVYTLPPSRDELTKNQVSLSCAVKGFYPSDIAVEWESFGT | and YTE mutations |
| | EWSNYKTTPPVLDSDGSFFLVSKLTVSKEEWQQGFVFSCSVMHEALHNHYTQ | |
| | KSLSLSPGK | |
| 175 | APEAAGGPSVFLFPPKPKDTLMISRTPEVTCVVVDVSHEDPEVKFNWYVDGV | Clone CH3C.35.23.1.1 |
| | EVHNAKTKPREEQYNSTYRVVSVLTVLHQDWLNGKEYKCKVSNKALPAPIE | with hole, LALA, and |
| | KTISKAKGQPREPQVYTLPPSRDELTKNQVSLSCAVKGFYPSDIAVEWESFGT | M198L and N204S |
| | EWSNYKTTPPVLDSDGSFFLVSKLTVSKEEWQQGFVFSCSVLHEALHSHYTQ | mutations |
| | KSLSLSPGK | |
| 176 | APEAAGGPSVFLFPPKPKDTLMISRTPEVTCVVVDVSHEDPEVKFNWYVDGV | Clone CH3C.35.23.1.1 |
| | EVHNAKTKPREEQYNSTYRVVSVLTVLHQDWLNGKEYKCKVSNKALGAPIE | with hole, LALAPG, |
| | KTISKAKGQPREPQVYTLPPSRDELTKNQVSLSCAVKGFYPSDIAVEWESFGT | and M198L and N204S |
| | EWSNYKTTPPVLDSDGSFFLVSKLTVSKEEWQQGFVFSCSVLHEALHSHYTQ | mutations |
| | KSLSLSPGK | |
| 177 | APELLGGPSVFLFPPKPKDTLMISRTPEVTCVVVDVSHEDPEVKFNWYVDGVE | Clone CH3C.35.23 |
| | VHNAKTKPREEQYNSTYRVVSVLTVLHQDWLNGKEYKCKVSNKALPAPIEK | |
| | TISKAKGQPREPQVYTLPPSRDELTKNQVSLTCLVKGFYPSDIAVEWESYGTE | |
| | WSNYKTTPPVLDSDGSFFLYSKLTVTKEEWQQGFVFSCSVMHEALHNHYTQ | |
| | KSLSLSPGK | |
| 178 | APELLGGPSVFLFPPKPKDTLMISRTPEVTCVVVDVSHEDPEVKFNWYVDGVE | Clone CH3C.35.23.3 |
| | VHNAKTKPREEQYNSTYRVVSVLTVLHQDWLNGKEYKCKVSNKALPAPIEK | |
| | TISKAKGQPREPQVYTLPPSRDELTKNQVSLTCLVKGFYPSDIAVEWESYGTE | |
| | WVNYKTTPPVLDSDGSFFLYSKLTVTKEEWQQGFVFSCSVMHEALHNHYTQ | |
| | KSLSLSPGK | |
| 179 | APELLGGPSVFLFPPKPKDTLMISRTPEVTCVVVDVSHEDPEVKFNWYVDGVE | Clone CH3C.35.23.4 |
| | VHNAKTKPREEQYNSTYRVVSVLTVLHQDWLNGKEYKCKVSNKALPAPIEK | |
| | TISKAKGQPREPQVYTLPPSRDELTKNQVSLTCLVKGFYPSDIAVEWESYGTE | |
| | WSNYKTTPPVLDSDGSFFLYSKLTVSKEEWQQGFVFSCSVMHEALHNHYTQ | |
| | KSLSLSPGK | |
| 180 | APELLGGPSVFLFPPKPKDTLMISRTPEVTCVVVDVSHEDPEVKFNWYVDGVE | Clone CH3C.35.23.1.1 |
| | VHNAKTKPREEQYNSTYRVVSVLTVLHQDWLNGKEYKCKVSNKALPAPIEK | |
| | TISKAKGQPREPQVYTLPPSRDELTKNQVSLTCLVKGFYPSDIAVEWESFGTE | |
| | WSNYKTTPPVLDSDGSFFLYSKLTVSKEEWQQGFVFSCSVMHEALHNHYTQ | |
| | KSLSLSPGK | |
| 181 | APELLGGPSVFLFPPKPKDTLMISRTPEVTCVVVDVSHEDPEVKFNWYVDGVE | Clone CH3C.18 variant |
| | VHNAKTKPREEQYNSTYRVVSVLTVLHQDWLNGKEYKCKVSNKALPAPIEK | 1 |
| | TISKAKGQPREPQVYTLPPSRDELTKNQVSLTCLVKGFYPSDIAVLWESLGHV | |
| | WAVYKTTPPVLDSDGSFFLYSKLTVPKSTWQQGWVFSCSVMHEALHNHYTQ | |
| | KSLSLSPGK | |
| 182 | APELLGGPSVFLFPPKPKDTLMISRTPEVTCVVVDVSHEDPEVKFNWYVDGVE | Clone CH3C.18 variant |
| | VHNAKTKPREEQYNSTYRVVSVLTVLHQDWLNGKEYKCKVSNKALPAPIEK | 2 |
| | TISKAKGQPREPQVYTLPPSRDELTKNQVSLTCLVKGFYPSDIAVYWESLGHV | |
| | WAVYKTTPPVLDSDGSFFLYSKLTVPKSTWQQGWVFSCSVMHEALHNHYTQ | |
| | KSLSLSPGK | |
| 183 | APELLGGPSVFLFPPKPKDTLMISRTPEVTCVVVDVSHEDPEVKFNWYVDGVE | Clone CH3C.18 variant |
| | VHNAKTKPREEQYNSTYRVVSVLTVLHQDWLNGKEYKCKVSNKALPAPIEK | 3 |
| | TISKAKGQPREPQVYTLPPSRDELTKNQVSLTCLVKGFYPSDIAVEWESLGHV | |
| | WAVYFTTPPVLDSDGSFFLYSKLTVPKSTWQQGWVFSCSVMHEALHNHYTQ | |
| | KSLSLSPGK | |
| 184 | APELLGGPSVFLFPPKPKDTLMISRTPEVTCVVVDVSHEDPEVKFNWYVDGVE | Clone CH3C.18 variant |
| | VHNAKTKPREEQYNSTYRVVSVLTVLHQDWLNGKEYKCKVSNKALPAPIEK | 4 |
| | TISKAKGQPREPQVYTLPPSRDELTKNQVSLTCLVKGFYPSDIAVEWESLGHV | |
| | WAVYHTTPPVLDSDGSFFLYSKLTVPKSTWQQGWVFSCSVMHEALHNHYTQ | |
| | KSLSLSPGK | |
| 185 | APELLGGPSVFLFPPKPKDTLMISRTPEVTCVVVDVSHEDPEVKFNWYVDGVE | Clone CH3C.35.13 |
| | VHNAKTKPREEQYNSTYRVVSVLTVLHQDWLNGKEYKCKVSNKALPAPIEK | |
| | TISKAKGQPREPQVYTLPPSRDELTKNQVSLTCLVKGFYPSDIAVWWESLGHV | |
| | WAVYKTTPPVLDSDGSFFLYSKLTVPKSTWQQGWVFSCSVMHEALHNHYTQ | |
| | KSLSLSPGK | |
| 186 | APELLGGPSVFLFPPKPKDTLMISRTPEVTCVVVDVSHEDPEVKFNWYVDGVE | Clone CH3C.35.14 |
| | VHNAKTKPREEQYNSTYRVVSVLTVLHQDWLNGKEYKCKVSNKALPAPIEK | |
| | TISKAKGQPREPQVYTLPPSRDELTKNQVSLTCLVKGFYPSDIAVEWESLGHV | |
| | WAVYQTTPPVLDSDGSFFLYSKLTVPKSTWQQGWVFSCSVMHEALHNHYTQ | |
| | KSLSLSPGK | |
| 187 | APELLGGPSVFLFPPKPKDTLMISRTPEVTCVVVDVSHEDPEVKFNWYVDGVE | Clone CH3C.35.15 |
| | VHNAKTKPREEQYNSTYRVVSVLTVLHQDWLNGKEYKCKVSNKALPAPIEK | |
| | TISKAKGQPREPQVYTLPPSRDELTKNQVSLTCLVKGFYPSDIAVWWESLGHV | |
| | WAVYQTTPPVLDSDGSFFLYSKLTVPKSTWQQGWVFSCSVMHEALHNHYTQ | |
| | KSLSLSPGK | |
| 188 | APELLGGPSVFLFPPKPKDTLMISRTPEVTCVVVDVSHEDPEVKFNWYVDGVE | Clone CH3C.35.16 |
| | VHNAKTKPREEQYNSTYRVVSVLTVLHQDWLNGKEYKCKVSNKALPAPIEK | |
| | TISKAKGQPREPQVYTLPPSRDELTKNQVSLTCLVKGFYPSDIAVWWESLGHV | |
| | WVNQKTTPPVLDSDGSFFLYSKLTVPKSTWQQGWVFSCSVMHEALHNHYTQ | |
| | KSLSLSPGK | |
| 189 | APELLGGPSVFLFPPKPKDTLMISRTPEVTCVVVDVSHEDPEVKFNWYVDGVE | Clone CH3C.35.17 |
| | VHNAKTKPREEQYNSTYRVVSVLTVLHQDWLNGKEYKCKVSNKALPAPIEK | |
| | TISKAKGQPREPQVYTLPPSRDELTKNQVSLTCLVKGFYPSDIAVEWESLGHV | |
| | WVNQQTTPPVLDSDGSFFLYSKLTVPKSTWQQGWVFSCSVMHEALHNHYTQ | |
| | KSLSLSPGK | |
| 190 | APELLGGPSVFLFPPKPKDTLMISRTPEVTCVVVDVSHEDPEVKFNWYVDGVE | Clone CH3C.35.18 |
| | VHNAKTKPREEQYNSTYRVVSVLTVLHQDWLNGKEYKCKVSNKALPAPIEK | |
| | TISKAKGQPREPQVYTLPPSRDELTKNQVSLTCLVKGFYPSDIAVWWESLGHV | |
| | WVNQQTTPPVLDSDGSFFLYSKLTVPKSTWQQGWVFSCSVMHEALHNHYTQ | |
| | KSLSLSPGK | |
| 191 | APELLGGPSVFLFPPKPKDTLMISRTPEVTCVVVDVSHEDPEVKFNWYVDGVE | Clone CH3 C.35.19 |
| | VHNAKTKPREEQYNSTYRVVSVLTVLHQDWLNGKEYKCKVSNKALPAPIEK | |
| | TISKAKGQPREPQVYTLPPSRDELTKNQVSLTCLVKGFYPSDIAVWWESYGTE | |
| | WSSYKTTPPVLDSDGSFFLYSKLTVTKSEWQQGFVFSCSVMHEALHNHYTQK | |
| | SLSLSPGK | |
| 192 | APELLGGPSVFLFPPKPKDTLMISRTPEVTCVVVDVSHEDPEVKFNWYVDGVE | Clone CH3C.35.20 |
| | VHNAKTKPREEQYNSTYRVVSVLTVLHQDWLNGKEYKCKVSNKALPAPIEK | |
| | TISKAKGQPREPQVYTLPPSRDELTKNQVSLTCLVKGFYPSDIAVEWESYGTE | |
| | WSSYKTTPPVLDSDGSFFLYSKLTVTKEEWQQGFVFSCSVMHEALHNHYTQK | |
| | SLSLSPGK | |
| 193 | APELLGGPSVFLFPPKPKDTLMISRTPEVTCVVVDVSHEDPEVKFNWYVDGVE | Clone CH3C.35.21 |
| | VHNAKTKPREEQYNSTYRVVSVLTVLHQDWLNGKEYKCKVSNKALPAPIEK | |
| | TISKAKGQPREPQVYTLPPSRDELTKNQVSLTCLVKGFYPSDIAVWWESYGTE | |
| | WSSYKTTPPVLDSDGSFFLYSKLTVTKEEWQQGFVFSCSVMHEALHNHYTQK | |
| | SLSLSPGK | |
| 194 | APELLGGPSVFLFPPKPKDTLMISRTPEVTCVVVDVSHEDPEVKFNWYVDGVE | Clone CH3C.35.22 |
| | VHNAKTKPREEQYNSTYRVVSVLTVLHQDWLNGKEYKCKVSNKALPAPIEK | |
| | TISKAKGQPREPQVYTLPPSRDELTKNQVSLTCLVKGFYPSDIAVWWESYGTE | |
| | WSNYKTTPPVLDSDGSFFLYSKLTVTKSEWQQGFVFSCSVMHEALHNHYTQ | |
| | KSLSLSPGK | |
| 195 | APELLGGPSVFLFPPKPKDTLMISRTPEVTCVVVDVSHEDPEVKFNWYVDGVE | Clone CH3C.35.24 |
| | VHNAKTKPREEQYNSTYRVVSVLTVLHQDWLNGKEYKCKVSNKALPAPIEK | |
| | TISKAKGQPREPQVYTLPPSRDELTKNQVSLTCLVKGFYPSDIAVWWESYGTE | |
| | WSNYKTTPPVLDSDGSFFLYSKLTVTKEEWQQGFVFSCSVMHEALHNHYTQ | |
| | KSLSLSPGK | |
| 196 | YxTEWSS | Consensus motif for |
| | | CH3C.35 |
| 197 | TxxExxxxF | Consensus motif for |
| | | CH3C.35 |
| 198 | APELLGGPSVFLFPPKPKDTLMISRTPEVTCVVVDVSHEDPEVKFNWYVDGVE | Clone CH3C.35.21.1 |
| | VHNAKTKPREEQYNSTYRVVSVLTVLHQDWLNGKEYKCKVSNKALPAPIEK | |
| | TISKAKGQPREPQVYTLPPSRDELTKNQVSLTCLVKGFYPSDIAVLWESYGTE | |
| | WSSYKTTPPVLDSDGSFFLYSKLTVTKSEWQQGFVFSCSVMHEALHNHYTQK | |
| | SLSLSPGK | |
| 199 | APELLGGPSVFLFPPKPKDTLMISRTPEVTCVVVDVSHEDPEVKFNWYVDGVE | Clone CH3C.35.21.2 |
| | VHNAKTKPREEQYNSTYRVVSVLTVLHQDWLNGKEYKCKVSNKALPAPIEK | |
| | TISKAKGQPREPQVYTLPPSRDELTKNQVSLTCLVKGFYPSDIAVLWESYGTE | |
| | WSSYRTTPPVLDSDGSFFLYSKLTVTKSEWQQGFVFSCSVMHEALHNHYTQK | |
| | SLSLSPGK | |
| 200 | APELLGGPSVFLFPPKPKDTLMISRTPEVTCVVVDVSHEDPEVKFNWYVDGVE | Clone CH3C.35.21.3 |
| | VHNAKTKPREEQYNSTYRVVSVLTVLHQDWLNGKEYKCKVSNKALPAPIEK | |
| | TISKAKGQPREPQVYTLPPSRDELTKNQVSLTCLVKGFYPSDIAVLWESYGTE | |
| | WSSYRTTPPVLDSDGSFFLYSKLTVTREEWQQGFVFSCSVMHEALHNHYTQK | |
| | SLSLSPGK | |
| 201 | APELLGGPSVFLFPPKPKDTLMISRTPEVTCVVVDVSHEDPEVKFNWYVDGVE | Clone CH3C.35.21.4 |
| | VHNAKTKPREEQYNSTYRVVSVLTVLHQDWLNGKEYKCKVSNKALPAPIEK | |
| | TISKAKGQPREPQVYTLPPSRDELTKNQVSLTCLVKGFYPSDIAVLWESYGTE | |
| | WSSYRTTPPVLDSDGSFFLYSKLTVTGEEWQQGFVFSCSVMHEALHNHYTQK | |
| | SLSLSPGK | |
| 202 | APELLGGPSVFLFPPKPKDTLMISRTPEVTCVVVDVSHEDPEVKFNWYVDGVE | Clone CH3C.35.21.5 |
| | VHNAKTKPREEQYNSTYRVVSVLTVLHQDWLNGKEYKCKVSNKALPAPIEK | |
| | TISKAKGQPREPQVYTLPPSRDELTKNQVSLTCLVKGFYPSDIAVLWESYGTE | |
| | WSSYRTTPPVLDSDGSFFLYSKLTVTREEWQQGFVFSCWVMHEALHNHYTQ | |
| | KSLSLSPGK | |
| 203 | APELLGGPSVFLFPPKPKDTLMISRTPEVTCVVVDVSHEDPEVKFNWYVDGVE | Clone CH3C.35.21.6 |
| | VHNAKTKPREEQYNSTYRVVSVLTVLHQDWLNGKEYKCKVSNKALPAPIEK | |
| | TISKAKGQPREPQVYTLPPSRDELTKNQVSLTCLVKGFYPSDIAVLWESYGTE | |
| | WSSYRTTPPVLDSDGSFFLYSKLTVTKEEWQQGFVFSCWVMHEALHNHYTQ | |
| | KSLSLSPGK | |
| 204 | APELLGGPSVFLFPPKPKDTLMISRTPEVTCVVVDVSHEDPEVKFNWYVDGVE | Clone CH3C.35.21.7 |
| | VHNAKTKPREEQYNSTYRVVSVLTVLHQDWLNGKEYKCKVSNKALPAPIEK | |
| | TISKAKGQPREPQVYTLPPSRDELTKNQVSLTCLVKGFYPSDIAVLWESYGTE | |
| | WSSYRTTPPVLDSDGSFFLYSKLTVTREEWQQGFVFTCWVMHEALHNHYTQ | |
| | KSLSLSPGK | |
| 205 | APELLGGPSVFLFPPKPKDTLMISRTPEVTCVVVDVSHEDPEVKFNWYVDGVE | Clone CH3C.35.21.8 |
| | VHNAKTKPREEQYNSTYRVVSVLTVLHQDWLNGKEYKCKVSNKALPAPIEK | |
| | TISKAKGQPREPQVYTLPPSRDELTKNQVSLTCLVKGFYPSDIAVLWESYGTE | |
| | WSSYRTTPPVLDSDGSFFLYSKLTVTREEWQQGFVFTCGVMHEALHNHYTQ | |
| | KSLSLSPGK | |
| 206 | APELLGGPSVFLFPPKPKDTLMISRTPEVTCVVVDVSHEDPEVKFNWYVDGVE | Clone CH3C.35.21.9 |
| | VHNAKTKPREEQYNSTYRVVSVLTVLHQDWLNGKEYKCKVSNKALPAPIEK | |
| | TISKAKGQPREPQVYTLPPSRDELTKNQVSLTCLVKGFYPSDIAVLWESYGTE | |
| | WSSYRTTPPVLDSDGSFFLYSKLTVTREEWQQGFVFECWVMHEALHNHYTQ | |
| | KSLSLSPGK | |
| 207 | APELLGGPSVFLFPPKPKDTLMISRTPEVTCVVVDVSHEDPEVKFNWYVDGVE | Clone CH3C.35.21.10 |
| | VHNAKTKPREEQYNSTYRVVSVLTVLHQDWLNGKEYKCKVSNKALPAPIEK | |
| | TISKAKGQPREPQVYTLPPSRDELTKNQVSLTCLVKGFYPSDIAVLWESYGTE | |
| | WSSYRTTPPVLDSDGSFFLYSKLTVTREEWQQGFVFKCWVMHEALHNHYTQ | |
| | KSLSLSPGK | |
| 208 | APELLGGPSVFLFPPKPKDTLMISRTPEVTCVVVDVSHEDPEVKFNWYVDGVE | Clone CH3C.35.21.11 |
| | VHNAKTKPREEQYNSTYRVVSVLTVLHQDWLNGKEYKCKVSNKALPAPIEK | |
| | TISKAKGQPREPQVYTLPPSRDELTKNQVSLTCLVKGFYPSDIAVLWESYGTE | |
| | WSSYRTTPPVLDSDGSFFLYSKLTVTPEEWQQGFVFKCWVMHEALHNHYTQ | |
| | KSLSLSPGK | |
| 209 | APELLGGPSVFLFPPKPKDTLMISRTPEVTCVVVDVSHEDPEVKFNWYVDGVE | Clone CH3C.35.21.12 |
| | VHNAKTKPREEQYNSTYRVVSVLTVLHQDWLNGKEYKCKVSNKALPAPIEK | |
| | TISKAKGQPREPQVYTLPPSRDELTKNQVSLTCLVKGFYPSDIAVWWESYGTE | |
| | WSSYRTTPPVLDSDGSFFLYSKLTVTREEWQQGFVFSCSVMHEALHNHYTQK | |
| | SLSLSPGK | |
| 210 | APELLGGPSVFLFPPKPKDTLMISRTPEVTCVVVDVSHEDPEVKFNWYVDGVE | Clone CH3C.35.21.13 |
| | VHNAKTKPREEQYNSTYRVVSVLTVLHQDWLNGKEYKCKVSNKALPAPIEK | |
| | TISKAKGQPREPQVYTLPPSRDELTKNQVSLTCLVKGFYPSDIAVWWESYGTE | |
| | WSSYRTTPPVLDSDGSFFLYSKLTVTGEEWQQGFVFSCSVMHEALHNHYTQK | |
| | SLSLSPGK | |
| 211 | APELLGGPSVFLFPPKPKDTLMISRTPEVTCVVVDVSHEDPEVKFNWYVDGVE | Clone CH3C.35.21.14 |
| | VHNAKTKPREEQYNSTYRVVSVLTVLHQDWLNGKEYKCKVSNKALPAPIEK | |
| | TISKAKGQPREPQVYTLPPSRDELTKNQVSLTCLVKGFYPSDIAVWWESYGTE | |
| | WSSYRTTPPVLDSDGSFFLYSKLTVTREEWQQGFVFTCWVMHEALHNHYTQ | |
| | KSLSLSPGK | |
| 212 | APELLGGPSVFLFPPKPKDTLMISRTPEVTCVVVDVSHEDPEVKFNWYVDGVE | Clone CH3C.35.21.15 |
| | VHNAKTKPREEQYNSTYRVVSVLTVLHQDWLNGKEYKCKVSNKALPAPIEK | |
| | TISKAKGQPREPQVYTLPPSRDELTKNQVSLTCLVKGFYPSDIAVWWESYGTE | |
| | WSSYRTTPPVLDSDGSFFLYSKLTVTGEEWQQGFVFTCWVMHEALHNHYTQ | |
| | KSLSLSPGK | |
| 213 | APELLGGPSVFLFPPKPKDTLMISRTPEVTCVVVDVSHEDPEVKFNWYVDGVE | Clone CH3C.35.21.16 |
| | VHNAKTKPREEQYNSTYRVVSVLTVLHQDWLNGKEYKCKVSNKALPAPIEK | |
| | TISKAKGQPREPQVYTLPPSRDELTKNQVSLTCLVKGFYPSDIAVWWESYGTE | |
| | WSSYRTTPPVLDSDGSFFLYSKLTVTREEWQQGFVFTCGVMHEALHNHYTQ | |
| | KSLSLSPGK | |
| 214 | APELLGGPSVFLFPPKPKDTLMISRTPEVTCVVVDVSHEDPEVKFNWYVDGVE | Clone CH3C.35.21.17 |
| | VHNAKTKPREEQYNSTYRVVSVLTVLHQDWLNGKEYKCKVSNKALPAPIEK | |
| | TISKAKGQPREPQVYTLPPSRDELTKNQVSLTCLVKGFYPSDIAVLWESYGTE | |
| | WSSYKTTPPVLDSDGSFFLYSKLTVTKEEWQQGFVFSCSVMHEALHNHYTQK | |
| | SLSLSPGK | |
| 215 | APELLGGPSVFLFPPKPKDTLMISRTPEVTCVVVDVSHEDPEVKFNWYVDGVE | Clone CH3C.35.21.18 |
| | VHNAKTKPREEQYNSTYRVVSVLTVLHQDWLNGKEYKCKVSNKALPAPIEK | |
| | TISKAKGQPREPQVYTLPPSRDELTKNQVSLTCLVKGFYPSDIAVLWESYGTE | |
| | WSSYRTTPPVLDSDGSFFLYSKLTVTKEEWQQGFVFSCSVMHEALHNHYTQK | |
| | SLSLSPGK | |
| 216 | APELLGGPSVFLFPPKPKDTLMISRTPEVTCVVVDVSHEDPEVKFNWYVDGVE | Clone CH3C.35.20.1 |
| | VHNAKTKPREEQYNSTYRVVSVLTVLHQDWLNGKEYKCKVSNKALPAPIEK | |
| | TISKAKGQPREPQVYTLPPSRDELTKNQVSLTCLVKGFYPSDIAVEWESFGTE | |
| | WSSYKTTPPVLDSDGSFFLYSKLTVTKEEWQQGFVFSCSVMHEALHNHYTQK | |
| | SLSLSPGK | |
| 217 | APELLGGPSVFLFPPKPKDTLMISRTPEVTCVVVDVSHEDPEVKFNWYVDGVE | Clone CH3C.35.20.2 |
| | VHNAKTKPREEQYNSTYRVVSVLTVLHQDWLNGKEYKCKVSNKALPAPIEK | |
| | TISKAKGQPREPQVYTLPPSRDELTKNQVSLTCLVKGFYPSDIAVEWESYGTE | |
| | WASYKTTPPVLDSDGSFFLYSKLTVTKEEWQQGFVFSCSVMHEALHNHYTQ | |
| | KSLSLSPGK | |
| 218 | APELLGGPSVFLFPPKPKDTLMISRTPEVTCVVVDVSHEDPEVKFNWYVDGVE | Clone CH3C.35.20.3 |
| | VHNAKTKPREEQYNSTYRVVSVLTVLHQDWLNGKEYKCKVSNKALPAPIEK | |
| | TISKAKGQPREPQVYTLPPSRDELTKNQVSLTCLVKGFYPSDIAVEWESYGTE | |
| | WVSYKTTPPVLDSDGSFFLYSKLTVTKEEWQQGFVFSCSVMHEALHNHYTQ | |
| | KSLSLSPGK | |
| 219 | APELLGGPSVFLFPPKPKDTLMISRTPEVTCVVVDVSHEDPEVKFNWYVDGVE | Clone CH3C.35.20.4 |
| | VHNAKTKPREEQYNSTYRVVSVLTVLHQDWLNGKEYKCKVSNKALPAPIEK | |
| | TISKAKGQPREPQVYTLPPSRDELTKNQVSLTCLVKGFYPSDIAVEWESYGTE | |
| | WSSYKTTPPVLDSDGSFFLYSKLTVSKEEWQQGFVFSCSVMHEALHNHYTQK | |
| | SLSLSPGK | |
| 220 | APELLGGPSVFLFPPKPKDTLMISRTPEVTCVVVDVSHEDPEVKFNWYVDGVE | Clone CH3C.35.20.5 |
| | VHNAKTKPREEQYNSTYRVVSVLTVLHQDWLNGKEYKCKVSNKALPAPIEK | |
| | TISKAKGQPREPQVYTLPPSRDELTKNQVSLTCLVKGFYPSDIAVEWESFGTE | |
| | WASYKTTPPVLDSDGSFFLYSKLTVTKEEWQQGFVFSCSVMHEALHNHYTQ | |
| | KSLSLSPGK | |
| 221 | APELLGGPSVFLFPPKPKDTLMISRTPEVTCVVVDVSHEDPEVKFNWYVDGVE | Clone CH3C.35.20.6 |
| | VHNAKTKPREEQYNSTYRVVSVLTVLHQDWLNGKEYKCKVSNKALPAPIEK | |
| | TISKAKGQPREPQVYTLPPSRDELTKNQVSLTCLVKGFYPSDIAVEWESFGTE | |
| | WVSYKTTPPVLDSDGSFFLYSKLTVTKEEWQQGFVFSCSVMHEALHNHYTQ | |
| | KSLSLSPGK | |
| 222 | APELLGGPSVFLFPPKPKDTLMISRTPEVTCVVVDVSHEDPEVKFNWYVDGVE | Clone CH3C.35.21.a.1 |
| | VHNAKTKPREEQYNSTYRVVSVLTVLHQDWLNGKEYKCKVSNKALPAPIEK | |
| | TISKAKGQPREPQVYTLPPSRDELTKNQVSLTCLVKGFYPSDIAVWWESFGTE | |
| | WSSYKTTPPVLDSDGSFFLYSKLTVTKEEWQQGFVFSCSVMHEALHNHYTQK | |
| | SLSLSPGK | |
| 223 | APELLGGPSVFLFPPKPKDTLMISRTPEVTCVVVDVSHEDPEVKFNWYVDGVE | Clone CH3C.35.21.a.2 |
| | VHNAKTKPREEQYNSTYRVVSVLTVLHQDWLNGKEYKCKVSNKALPAPIEK | |
| | TISKAKGQPREPQVYTLPPSRDELTKNQVSLTCLVKGFYPSDIAVWWESYGTE | |
| | WASYKTTPPVLDSDGSFFLYSKLTVTKEEWQQGFVFSCSVMHEALHNHYTQ | |
| | KSLSLSPGK | |
| 224 | APELLGGPSVFLFPPKPKDTLMISRTPEVTCVVVDVSHEDPEVKFNWYVDGVE | Clone CH3C.35.21.a.3 |
| | VHNAKTKPREEQYNSTYRVVSVLTVLHQDWLNGKEYKCKVSNKALPAPIEK | |
| | TISKAKGQPREPQVYTLPPSRDELTKNQVSLTCLVKGFYPSDIAVWWESYGTE | |
| | WVSYKTTPPVLDSDGSFFLYSKLTVTKEEWQQGFVFSCSVMHEALHNHYTQ | |
| | KSLSLSPGK | |
| 225 | APELLGGPSVFLFPPKPKDTLMISRTPEVTCVVVDVSHEDPEVKFNWYVDGVE | Clone CH3C.35.21.a.4 |
| | VHNAKTKPREEQYNSTYRVVSVLTVLHQDWLNGKEYKCKVSNKALPAPIEK | |
| | TISKAKGQPREPQVYTLPPSRDELTKNQVSLTCLVKGFYPSDIAVWWESYGTE | |
| | WSSYKTTPPVLDSDGSFFLYSKLTVSKEEWQQGFVFSCSVMHEALHNHYTQK | |
| | SLSLSPGK | |
| 226 | APELLGGPSVFLFPPKPKDTLMISRTPEVTCVVVDVSHEDPEVKFNWYVDGVE | Clone CH3C.35.21.a.5 |
| | VHNAKTKPREEQYNSTYRVVSVLTVLHQDWLNGKEYKCKVSNKALPAPIEK | |
| | TISKAKGQPREPQVYTLPPSRDELTKNQVSLTCLVKGFYPSDIAVWWESFGTE | |
| | WASYKTTPPVLDSDGSFFLYSKLTVTKEEWQQGFVFSCSVMHEALHNHYTQ | |
| | KSLSLSPGK | |
| 227 | APELLGGPSVFLFPPKPKDTLMISRTPEVTCVVVDVSHEDPEVKFNWYVDGVE | Clone CH3C.35.21.a.6 |
| | VHNAKTKPREEQYNSTYRVVSVLTVLHQDWLNGKEYKCKVSNKALPAPIEK | |
| | TISKAKGQPREPQVYTLPPSRDELTKNQVSLTCLVKGFYPSDIAVWWESFGTE | |
| | WVSYKTTPPVLDSDGSFFLYSKLTVTKEEWQQGFVFSCSVMHEALHNHYTQ | |
| | KSLSLSPGK | |
| 228 | APELLGGPSVFLFPPKPKDTLMISRTPEVTCVVVDVSHEDPEVKFNWYVDGVE | Clone CH3C.35.23.1 |
| | VHNAKTKPREEQYNSTYRVVSVLTVLHQDWLNGKEYKCKVSNKALPAPIEK | |
| | TISKAKGQPREPQVYTLPPSRDELTKNQVSLTCLVKGFYPSDIAVEWESFGTE | |
| | WSNYKTTPPVLDSDGSFFLYSKLTVTKEEWQQGFVFSCSVMHEALHNHYTQ | |
| | KSLSLSPGK | |
| 229 | APELLGGPSVFLFPPKPKDTLMISRTPEVTCVVVDVSHEDPEVKFNWYVDGVE | Clone CH3C.35.23.2 |
| | VHNAKTKPREEQYNSTYRVVSVLTVLHQDWLNGKEYKCKVSNKALPAPIEK | |
| | TISKAKGQPREPQVYTLPPSRDELTKNQVSLTCLVKGFYPSDIAVEWESYGTE | |
| | WANYKTTPPVLDSDGSFFLYSKLTVTKEEWQQGFVFSCSVMHEALHNHYTQ | |
| | KSLSLSPGK | |
| 230 | APELLGGPSVFLFPPKPKDTLMISRTPEVTCVVVDVSHEDPEVKFNWYVDGVE | Clone CH3C.35.23.5 |
| | VHNAKTKPREEQYNSTYRVVSVLTVLHQDWLNGKEYKCKVSNKALPAPIEK | |
| | TISKAKGQPREPQVYTLPPSRDELTKNQVSLTCLVKGFYPSDIAVEWESFGTE | |
| | WANYKTTPPVLDSDGSFFLYSKLTVTKEEWQQGFVFSCSVMHEALHNHYTQ | |
| | KSLSLSPGK | |
| 231 | APELLGGPSVFLFPPKPKDTLMISRTPEVTCVVVDVSHEDPEVKFNWYVDGVE | Clone CH3C.35.23.6 |
| | VHNAKTKPREEQYNSTYRVVSVLTVLHQDWLNGKEYKCKVSNKALPAPIEK | |
| | TISKAKGQPREPQVYTLPPSRDELTKNQVSLTCLVKGFYPSDIAVEWESFGTE | |
| | WVNYKTTPPVLDSDGSFFLYSKLTVTKEEWQQGFVFSCSVMHEALHNHYTQ | |
| | KSLSLSPGK | |
| 232 | APELLGGPSVFLFPPKPKDTLMISRTPEVTCVVVDVSHEDPEVKFNWYVDGVE | Clone CH3C.35.24.1 |
| | VHNAKTKPREEQYNSTYRVVSVLTVLHQDWLNGKEYKCKVSNKALPAPIEK | |
| | TISKAKGQPREPQVYTLPPSRDELTKNQVSLTCLVKGFYPSDIAVWWESFGTE | |
| | WSNYKTTPPVLDSDGSFFLYSKLTVTKEEWQQGFVFSCSVMHEALHNHYTQ | |
| | KSLSLSPGK | |
| 233 | APELLGGPSVFLFPPKPKDTLMISRTPEVTCVVVDVSHEDPEVKFNWYVDGVE | Clone CH3C.35.24.2 |
| | VHNAKTKPREEQYNSTYRVVSVLTVLHQDWLNGKEYKCKVSNKALPAPIEK | |
| | TISKAKGQPREPQVYTLPPSRDELTKNQVSLTCLVKGFYPSDIAVWWESYGTE | |
| | WANYKTTPPVLDSDGSFFLYSKLTVTKEEWQQGFVFSCSVMHEALHNHYTQ | |
| | KSLSLSPGK | |
| 234 | APELLGGPSVFLFPPKPKDTLMISRTPEVTCVVVDVSHEDPEVKFNWYVDGVE | Clone CH3C.35.24.3 |
| | VHNAKTKPREEQYNSTYRVVSVLTVLHQDWLNGKEYKCKVSNKALPAPIEK | |
| | TISKAKGQPREPQVYTLPPSRDELTKNQVSLTCLVKGFYPSDIAVWWESYGTE | |
| | WVNYKTTPPVLDSDGSFFLYSKLTVTKEEWQQGFVFSCSVMHEALHNHYTQ | |
| | KSLSLSPGK | |
| 235 | APELLGGPSVFLFPPKPKDTLMISRTPEVTCVVVDVSHEDPEVKFNWYVDGVE | Clone CH3C.35.24.4 |
| | VHNAKTKPREEQYNSTYRVVSVLTVLHQDWLNGKEYKCKVSNKALPAPIEK | |
| | TISKAKGQPREPQVYTLPPSRDELTKNQVSLTCLVKGFYPSDIAVWWESYGTE | |
| | WSNYKTTPPVLDSDGSFFLYSKLTVSKEEWQQGFVFSCSVMHEALHNHYTQ | |
| | KSLSLSPGK | |
| 236 | APELLGGPSVFLFPPKPKDTLMISRTPEVTCVVVDVSHEDPEVKFNWYVDGVE | Clone CH3C.35.24.5 |
| | VHNAKTKPREEQYNSTYRVVSVLTVLHQDWLNGKEYKCKVSNKALPAPIEK | |
| | TISKAKGQPREPQVYTLPPSRDELTKNQVSLTCLVKGFYPSDIAVWWESFGTE | |
| | WANYKTTPPVLDSDGSFFLYSKLTVTKEEWQQGFVFSCSVMHEALHNHYTQ | |
| | KSLSLSPGK | |
| 237 | APELLGGPSVFLFPPKPKDTLMISRTPEVTCVVVDVSHEDPEVKFNWYVDGVE | Clone CH3C.35.24.6 |
| | VHNAKTKPREEQYNSTYRVVSVLTVLHQDWLNGKEYKCKVSNKALPAPIEK | |
| | TISKAKGQPREPQVYTLPPSRDELTKNQVSLTCLVKGFYPSDIAVWWESFGTE | |
| | WVNYKTTPPVLDSDGSFFLYSKLTVTKEEWQQGFVFSCSVMHEALHNHYTQ | |
| | KSLSLSPGK | |
| 238 | APELLGGPSVFLFPPKPKDTLMISRTPEVTCVVVDVSHEDPEVKFNWYVDGVE | Clone |
| | VHNAKTKPREEQYNSTYRVVSVLTVLHQDWLNGKEYKCKVSNKALPAPIEK | CH3C.35.21.17.1 |
| | TISKAKGQPREPQVYTLPPSRDELTKNQVSLTCLVKGFYPSDIAVLWESFGTE | |
| | WSSYKTTPPVLDSDGSFFLYSKLTVTKEEWQQGFVFSCSVMHEALHNHYTQK | |
| | SLSLSPGK | |
| 239 | APELLGGPSVFLFPPKPKDTLMISRTPEVTCVVVDVSHEDPEVKFNWYVDGVE | Clone |
| | VHNAKTKPREEQYNSTYRVVSVLTVLHQDWLNGKEYKCKVSNKALPAPIEK | CH3C.35.21.17.2 |
| | TISKAKGQPREPQVYTLPPSRDELTKNQVSLTCLVKGFYPSDIAVLWESYGTE | |
| | WASYKTTPPVLDSDGSFFLYSKLTVTKEEWQQGFVFSCSVMHEALHNHYTQ | |
| | KSLSLSPGK | |
| 240 | APELLGGPSVFLFPPKPKDTLMISRTPEVTCVVVDVSHEDPEVKFNWYVDGVE | Clone |
| | VHNAKTKPREEQYNSTYRVVSVLTVLHQDWLNGKEYKCKVSNKALPAPIEK | CH3C.35.21.17.3 |
| | TISKAKGQPREPQVYTLPPSRDELTKNQVSLTCLVKGFYPSDIAVLWESYGTE | |
| | WVSYKTTPPVLDSDGSFFLYSKLTVTKEEWQQGFVFSCSVMHEALHNHYTQ | |
| | KSLSLSPGK | |
| 241 | APELLGGPSVFLFPPKPKDTLMISRTPEVTCVVVDVSHEDPEVKFNWYVDGVE | Clone |
| | VHNAKTKPREEQYNSTYRVVSVLTVLHQDWLNGKEYKCKVSNKALPAPIEK | CH3C.35.21.17.4 |
| | TISKAKGQPREPQVYTLPPSRDELTKNQVSLTCLVKGFYPSDIAVLWESYGTE | |
| | WSSYKTTPPVLDSDGSFFLYSKLTVSKEEWQQGFVFSCSVMHEALHNHYTQK | |
| | SLSLSPGK | |
| 242 | APELLGGPSVFLFPPKPKDTLMISRTPEVTCVVVDVSHEDPEVKFNWYVDGVE | Clone |
| | VHNAKTKPREEQYNSTYRVVSVLTVLHQDWLNGKEYKCKVSNKALPAPIEK | CH3C.35.21.17.5 |
| | TISKAKGQPREPQVYTLPPSRDELTKNQVSLTCLVKGFYPSDIAVLWESFGTE | |
| | WASYKTTPPVLDSDGSFFLYSKLTVTKEEWQQGFVFSCSVMHEALHNHYTQ | |
| | KSLSLSPGK | |
| 243 | APELLGGPSVFLFPPKPKDTLMISRTPEVTCVVVDVSHEDPEVKFNWYVDGVE | Clone |
| | VHNAKTKPREEQYNSTYRVVSVLTVLHQDWLNGKEYKCKVSNKALPAPIEK | CH3C.35.21.17.6 |
| | TISKAKGQPREPQVYTLPPSRDELTKNQVSLTCLVKGFYPSDIAVLWESFGTE | |
| | WVSYKTTPPVLDSDGSFFLYSKLTVTKEEWQQGFVFSCSVMHEALHNHYTQ | |
| | KSLSLSPGK | |
| 244 | APELLGGPSVFLFPPKPKDTLMISRTPEVTCVVVDVSHEDPEVKFNWYVDGVE | Clone CH3C.35.N390 |
| | VHNAKTKPREEQYNSTYRVVSVLTVLHQDWLNGKEYKCKVSNKALPAPIEK | |
| | TISKAKGQPREPQVYTLPPSRDELTKNQVSLTCLVKGFYPSDIAVEWESYGTE | |
| | WSNYKTTPPVLDSDGSFFLYSKLTVTKSEWQQGFVFSCSVMHEALHNHYTQ | |
| | KSLSLSPGK | |
| 245 | APELLGGPSVFLFPPKPKDTLMISRTPEVTCVVVDVSHEDPEVKFNWYVDGVE | Clone CH3C.35.20.1.1 |
| | VHNAKTKPREEQYNSTYRVVSVLTVLHQDWLNGKEYKCKVSNKALPAPIEK | |
| | TISKAKGQPREPQVYTLPPSRDELTKNQVSLTCLVKGFYPSDIAVEWESFGTE | |
| | WSSYKTTPPVLDSDGSFFLYSKLTVSKEEWQQGFVFSCSVMHEALHNHYTQK | |
| | SLSLSPGK | |
| 246 | APELLGGPSVFLFPPKPKDTLMISRTPEVTCVVVDVSHEDPEVKFNWYVDGVE | Clone CH3C.35.23.2.1 |
| | VHNAKTKPREEQYNSTYRVVSVLTVLHQDWLNGKEYKCKVSNKALPAPIEK | |
| | TISKAKGQPREPQVYTLPPSRDELTKNQVSLTCLVKGFYPSDIAVEWESYGTE | |
| | WANYKTTPPVLDSDGSFFLYSKLTVSKSEWQQGFVFSCSVMHEALHNHYTQ | |
| | KSLSLSPGK | |
| 247 | APELLGGPSVFLFPPKPKDTLMISRTPEVTCVVVDVSHEDPEVKFNWYVDGVE | Clone CH3C.35.S413 |
| | VHNAKTKPREEQYNSTYRVVSVLTVLHQDWLNGKEYKCKVSNKALPAPIEK | |
| | TISKAKGQPREPQVYTLPPSRDELTKNQVSLTCLVKGFYPSDIAVEWESYGTE | |
| | WSSYKTTPPVLDSDGSFFLYSKLTVSKSEWQQGFVFSCSVMHEALHNHYTQK | |
| | SLSLSPGK | |
| 248 | APELLGGPSVFLFPPKPKDTLMISRTPEVTCVVVDVSHEDPEVKFNWYVDGVE | Clone CH3C.35.23.3.1 |
| | VHNAKTKPREEQYNSTYRVVSVLTVLHQDWLNGKEYKCKVSNKALPAPIEK | |
| | TISKAKGQPREPQVYTLPPSRDELTKNQVSLTCLVKGFYPSDIAVEWESYGTE | |
| | WVNYKTTPPVLDSDGSFFLYSKLTVSKEEWQQGFVFSCSVMHEALHNHYTQ | |
| | KSLSLSPGK | |
| 249 | APELLGGPSVFLFPPKPKDTLMISRTPEVTCVVVDVSHEDPEVKFNWYVDGVE | Clone CH3C.35.23.6.1 |
| | VHNAKTKPREEQYNSTYRVVSVLTVLHQDWLNGKEYKCKVSNKALPAPIEK | |
| | TISKAKGQPREPQVYTLPPSRDELTKNQVSLTCLVKGFYPSDIAVEWESFGTE | |
| | WVNYKTTPPVLDSDGSFFLYSKLTVSKEEWQQGFVFSCSVMHEALHNHYTQ | |
| | KSLSLSPGK | |
| 250 | GYSFTGYWMN | Anti-HER2_DI CDR- |
| | | H1 |
| 251 | MIHPSDSEIRANQKFRD | Anti-HER2_DI CDR- |
| | | H2 |
| 252 | ARGTYDGGFEY | Anti-HER2_DI CDR- |
| | | H3 |
| 253 | RASQSVSGSRFTYMH | Anti-HER2_DI CDR- |
| | | L1 |
| 254 | YASILES | Anti-HER2_DI CDR- |
| | | L2 |
| 255 | QHSWEIPP | Anti-HER2_DI CDR- |
| | | L3 |
| 256 | QVQLQQPGAELVRPGASVKLSCKASGYSFTGYWMNWLKQRPGQGLEWIGMI | Anti-HER2_DI VH |
| | HPSDSEIRANQKFRDKATLTVDKSSTTAYMQLSSPTSEDSAVYYCARGTYDG | sequence |
| | GFEYWGQGTTLTVSS | |
| 257 | DIVLTQSPASLVVSLGQRATISCRASQSVSGSRFTYMHWYQQKPGQPPKLLIK | Anti-HER2_DI VL |
| | YASILESGVPARFSGGGSGTDFTLNIHPVEEDDTATYYCQHSWEIPPWTFGGG | sequence |
| | TKLEIK | |
| 258 | QVQLQQPGAELVRPGASVKLSCKASGYSFTGYWMNWLKQRPGQGLEWIGMI | Anti-HER2_DI fused to |
| | HPSDSEIRANQKFRDKATLTVDKSSTTAYMQLSSPTSEDSAVYYCARGTYDG | CH3C.35.23.1.1 with |
| | GFEYWGQGTTLTVSSASTKGPSVFPLAPSSKSTSGGTAALGCLVKDYFPEPVT | knob mutation |
| | VSWNSGALTSGVHTFPAVLQSSGLYSLSSVVTVPSSSLGTQTYICNVNHKPSN | |
| | TKVDKKVEPKSCDKTHTCPPCPAPELLGGPSVFLFPPKPKDTLMISRTPEVTCV | |
| | VVDVSHEDPEVKFNWYVDGVEVHNAKTKPREEQYNSTYRVVSVLTVLHQD | |
| | WLNGKEYKCKVSNKALPAPIEKTISKAKGQPREPQVYTLPPSRDELTKNQVSL | |
| | WCLVKGFYPSDIAVEWESFGTEWSNYKTTPPVLDSDGSFFLYSKLTVSKEEW | |
| | QQGFVFSCSVMHEALHNHYTQKSLSLSPGK | |
| 259 | QVQLQQPGAELVRPGASVKLSCKASGYSFTGYWMNWLKQRPGQGLEWIGMI | Anti-HER2_DI fused to |
| | HPSDSEIRANQKFRDKATLTVDKSSTTAYMQLSSPTSEDSAVYYCARGTYDG | CH3C.35.23.1.1 with |
| | GFEYWGQGTTLTVSSASTKGPSVFPLAPSSKSTSGGTAALGCLVKDYFPEPVT | knob and LALA |
| | VSWNSGALTSGVHTFPAVLQSSGLYSLSSVVTVPSSSLGTQTYICNVNHKPSN | mutations |
| | TKVDKKVEPKSCDKTHTCPPCPAPEAAGGPSVFLFPPKPKDTLMISRTPEVTC | |
| | VVVDVSHEDPEVKFNWYVDGVEVHNAKTKPREEQYNSTYRVVSVLTVLHQ | |
| | DWLNGKEYKCKVSNKALPAPIEKTISKAKGQPREPQVYTLPPSRDELTKNQVS | |
| | LWCLVKGFYPSDIAVEWESFGTEWSNYKTTPPVLDSDGSFFLYSKLTVSKEE | |
| | WQQGFVFSCSVMHEALHNHYTQKSLSLSPGK | |
| 260 | QVQLQQPGAELVRPGASVKLSCKASGYSFTGYWMNWLKQRPGQGLEWIGMI | Anti-HER2_DI fused to |
| | HPSDSEIRANQKFRDKATLTVDKSSTTAYMQLSSPTSEDSAVYYCARGTYDG | CH3C.35.23.1.1 with |
| | GFEYWGQGTTLTVSSASTKGPSVFPLAPSSKSTSGGTAALGCLVKDYFPEPVT | knob and M428L and |
| | VSWNSGALTSGVHTFPAVLQSSGLYSLSSVVTVPSSSLGTQTYICNVNHKPSN | N434S mutations |
| | TKVDKKVEPKSCDKTHTCPPCPAPELLGGPSVFLFPPKPKDTLMISRTPEVTCV | |
| | VVDVSHEDPEVKFNWYVDGVEVHNAKTKPREEQYNSTYRVVSVLTVLHQD | |
| | WLNGKEYKCKVSNKALPAPIEKTISKAKGQPREPQVYTLPPSRDELTKNQVSL | |
| | WCLVKGFYPSDIAVEWESFGTEWSNYKTTPPVLDSDGSFFLYSKLTVSKEEW | |
| | QQGFVFSCSVLHEALHSHYTQKSLSLSPGK | |
| 261 | QVQLQQPGAELVRPGASVKLSCKASGYSFTGYWMNWLKQRPGQGLEWIGMI | Anti-HER2_DI fused to |
| | HPSDSEIRANQKFRDKATLTVDKSSTTAYMQLSSPTSEDSAVYYCARGTYDG | CH3C.35.23.1.1 with |
| | GFEYWGQGTTLTVSSASTKGPSVFPLAPSSKSTSGGTAALGCLVKDYFPEPVT | knob, LALA, and |
| | VSWNSGALTSGVHTFPAVLQSSGLYSLSSVVTVPSSSLGTQTYICNVNHKPSN | M428L and N434S |
| | TKVDKKVEPKSCDKTHTCPPCPAPEAAGGPSVFLFPPKPKDTLMISRTPEVTC | mutations |
| | VVVDVSHEDPEVKFNWYVDGVEVHNAKTKPREEQYNSTYRVVSVLTVLHQ | |
| | DWLNGKEYKCKVSNKALPAPIEKTISKAKGQPREPQVYTLPPSRDELTKNQVS | |
| | LWCLVKGFYPSDIAVEWESFGTEWSNYKTTPPVLDSDGSFFLYSKLTVSKEE | |
| | WQQGFVFSCSVLHEALHSHYTQKSLSLSPGK | |
| 262 | QVQLQQPGAELVRPGASVKLSCKASGYSFTGYWMNWLKQRPGQGLEWIGMI | Anti-HER2_DI fused to |
| | HPSDSEIRANQKFRDKATLTVDKSSTTAYMQLSSPTSEDSAVYYCARGTYDG | CH3C.35.23.1.1 with |
| | GFEYWGQGTTLTVSSASTKGPSVFPLAPSSKSTSGGTAALGCLVKDYFPEPVT | hole mutations |
| | VSWNSGALTSGVHTFPAVLQSSGLYSLSSVVTVPSSSLGTQTYICNVNHKPSN | |
| | TKVDKKVEPKSCDKTHTCPPCPAPELLGGPSVFLFPPKPKDTLMISRTPEVTCV | |
| | VVDVSHEDPEVKFNWYVDGVEVHNAKTKPREEQYNSTYRVVSVLTVLHQD | |
| | WLNGKEYKCKVSNKALPAPIEKTISKAKGQPREPQVYTLPPSRDELTKNQVSL | |
| | SCAVKGFYPSDIAVEWESFGTEWSNYKTTPPVLDSDGSFFLVSKLTVSKEEWQ | |
| | QGFVFSCSVMHEALHNHYTQKSLSLSPGK | |
| 263 | QVQLQQPGAELVRPGASVKLSCKASGYSFTGYWMNWLKQRPGQGLEWIGMI | Anti-HER2_DI fused to |
| | HPSDSEIRANQKFRDKATLTVDKSSTTAYMQLSSPTSEDSAVYYCARGTYDG | CH3C.35.23.1.1 with |
| | GFEYWGQGTTLTVSSASTKGPSVFPLAPSSKSTSGGTAALGCLVKDYFPEPVT | hole and LALA |
| | VSWNSGALTSGVHTFPAVLQSSGLYSLSSVVTVPSSSLGTQTYICNVNHKPSN | mutations |
| | TKVDKKVEPKSCDKTHTCPPCPAPEAAGGPSVFLFPPKPKDTLMISRTPEVTC | |
| | VVVDVSHEDPEVKFNWYVDGVEVHNAKTKPREEQYNSTYRVVSVLTVLHQ | |
| | DWLNGKEYKCKVSNKALPAPIEKTISKAKGQPREPQVYTLPPSRDELTKNQVS | |
| | LSCAVKGFYPSDIAVEWESFGTEWSNYKTTPPVLDSDGSFFLVSKLTVSKEEW | |
| | QQGFVFSCSVMHEALHNHYTQKSLSLSPGK | |
| 264 | QVQLQQPGAELVRPGASVKLSCKASGYSFTGYWMNWLKQRPGQGLEWIGMI | Anti-HER2_DI fused to |
| | HPSDSEIRANQKFRDKATLTVDKSSTTAYMQLSSPTSEDSAVYYCARGTYDG | CH3C.35.23.1.1 with |
| | GFEYWGQGTTLTVSSASTKGPSVFPLAPSSKSTSGGTAALGCLVKDYFPEPVT | hole and M428L and |
| | VSWNSGALTSGVHTFPAVLQSSGLYSLSSVVTVPSSSLGTQTYICNVNHKPSN | N434S mutations |
| | TKVDKKVEPKSCDKTHTCPPCPAPELLGGPSVFLFPPKPKDTLMISRTPEVTCV | |
| | VVDVSHEDPEVKFNWYVDGVEVHNAKTKPREEQYNSTYRVVSVLTVLHQD | |
| | WLNGKEYKCKVSNKALPAPIEKTISKAKGQPREPQVYTLPPSRDELTKNQVSL | |
| | SCAVKGFYPSDIAVEWESFGTEWSNYKTTPPVLDSDGSFFLVSKLTVSKEEWQ | |
| | QGFVFSCSVLHEALHSHYTQKSLSLSPGK | |
| 265 | QVQLQQPGAELVRPGASVKLSCKASGYSFTGYWMNWLKQRPGQGLEWIGMI | Anti-HER2_DI fused to |
| | HPSDSEIRANQKFRDKATLTVDKSSTTAYMQLSSPTSEDSAVYYCARGTYDG | CH3C.35.23.1.1 with |
| | GFEYWGQGTTLTVSSASTKGPSVFPLAPSSKSTSGGTAALGCLVKDYFPEPVT | hole, LALA, and |
| | VSWNSGALTSGVHTFPAVLQSSGLYSLSSVVTVPSSSLGTQTYICNVNHKPSN | M428L and N434S |
| | TKVDKKVEPKSCDKTHTCPPCPAPEAAGGPSVFLFPPKPKDTLMISRTPEVTC | mutations |
| | VVVDVSHEDPEVKFNWYVDGVEVHNAKTKPREEQYNSTYRVVSVLTVLHQ | |
| | DWLNGKEYKCKVSNKALPAPIEKTISKAKGQPREPQVYTLPPSRDELTKNQVS | |
| | LSCAVKGFYPSDIAVEWESFGTEWSNYKTTPPVLDSDGSFFLVSKLTVSKEEW | |
| | QQGFVFSCSVLHEALHSHYTQKSLSLSPGK | |
| 266 | QVQLQQPGAELVRPGASVKLSCKASGYSFTGYWMNWLKQRPGQGLEWIGMI | Anti-HER2_DI fused to |
| | HPSDSEIRANQKFRDKATLTVDKSSTTAYMQLSSPTSEDSAVYYCARGTYDG | CH3C.35.23.3 with |
| | GFEYWGQGTTLTVSSASTKGPSVFPLAPSSKSTSGGTAALGCLVKDYFPEPVT | knob mutation |
| | VSWNSGALTSGVHTFPAVLQSSGLYSLSSVVTVPSSSLGTQTYICNVNHKPSN | |
| | TKVDKKVEPKSCDKTHTCPPCPAPELLGGPSVFLFPPKPKDTLMISRTPEVTCV | |
| | VVDVSHEDPEVKFNWYVDGVEVHNAKTKPREEQYNSTYRVVSVLTVLHQD | |
| | WLNGKEYKCKVSNKALPAPIEKTISKAKGQPREPQVYTLPPSRDELTKNQVSL | |
| | WCLVKGFYPSDIAVEWESYGTEWVNYKTTPPVLDSDGSFFLYSKLTVTKEEW | |
| | QQGFVFSCSVMHEALHNHYTQKSLSLSPGK | |
| 267 | QVQLQQPGAELVRPGASVKLSCKASGYSFTGYWMNWLKQRPGQGLEWIGMI | Anti-HER2_DI fused to |
| | HPSDSEIRANQKFRDKATLTVDKSSTTAYMQLSSPTSEDSAVYYCARGTYDG | CH3C.35.23.3 with |
| | GFEYWGQGTTLTVSSASTKGPSVFPLAPSSKSTSGGTAALGCLVKDYFPEPVT | knob and LALA |
| | VSWNSGALTSGVHTFPAVLQSSGLYSLSSVVTVPSSSLGTQTYICNVNHKPSN | mutations |
| | TKVDKKVEPKSCDKTHTCPPCPAPEAAGGPSVFLFPPKPKDTLMISRTPEVTC | |
| | VVVDVSHEDPEVKFNWYVDGVEVHNAKTKPREEQYNSTYRVVSVLTVLHQ | |
| | DWLNGKEYKCKVSNKALPAPIEKTISKAKGQPREPQVYTLPPSRDELTKNQVS | |
| | LWCLVKGFYPSDIAVEWESYGTEWVNYKTTPPVLDSDGSFFLYSKLTVTKEE | |
| | WQQGFVFSCSVMHEALHNHYTQKSLSLSPGK | |
| 268 | QVQLQQPGAELVRPGASVKLSCKASGYSFTGYWMNWLKQRPGQGLEWIGMI | Anti-HER2_DI fused to |
| | HPSDSEIRANQKFRDKATLTVDKSSTTAYMQLSSPTSEDSAVYYCARGTYDG | CH3C.35.23.3 with |
| | GFEYWGQGTTLTVSSASTKGPSVFPLAPSSKSTSGGTAALGCLVKDYFPEPVT | knob and M428L and |
| | VSWNSGALTSGVHTFPAVLQSSGLYSLSSVVTVPSSSLGTQTYICNVNHKPSN | N434S mutations |
| | TKVDKKVEPKSCDKTHTCPPCPAPELLGGPSVFLFPPKPKDTLMISRTPEVTCV | |
| | VVDVSHEDPEVKFNWYVDGVEVHNAKTKPREEQYNSTYRVVSVLTVLHQD | |
| | WLNGKEYKCKVSNKALPAPIEKTISKAKGQPREPQVYTLPPSRDELTKNQVSL | |
| | WCLVKGFYPSDIAVEWESYGTEWVNYKTTPPVLDSDGSFFLYSKLTVTKEEW | |
| | QQGFVFSCSVLHEALHSHYTQKSLSLSPGK | |
| 269 | QVQLQQPGAELVRPGASVKLSCKASGYSFTGYWMNWLKQRPGQGLEWIGMI | Anti-HER2_DI fused to |
| | HPSDSEIRANQKFRDKATLTVDKSSTTAYMQLSSPTSEDSAVYYCARGTYDG | CH3C.35.23.3 with |
| | GFEYWGQGTTLTVSSASTKGPSVFPLAPSSKSTSGGTAALGCLVKDYFPEPVT | knob, LALA, and |
| | VSWNSGALTSGVHTFPAVLQSSGLYSLSSVVTVPSSSLGTQTYICNVNHKPSN | M428L and N434S |
| | TKVDKKVEPKSCDKTHTCPPCPAPEAAGGPSVFLFPPKPKDTLMISRTPEVTC | mutations |
| | VVVDVSHEDPEVKFNWYVDGVEVHNAKTKPREEQYNSTYRVVSVLTVLHQ | |
| | DWLNGKEYKCKVSNKALPAPIEKTISKAKGQPREPQVYTLPPSRDELTKNQVS | |
| | LWCLVKGFYPSDIAVEWESYGTEWVNYKTTPPVLDSDGSFFLYSKLTVTKEE | |
| | WQQGFVFSCSVLHEALHSHYTQKSLSLSPGK | |
| 270 | QVQLQQPGAELVRPGASVKLSCKASGYSFTGYWMNWLKQRPGQGLEWIGMI | Anti-HER2_DI fused to |
| | HPSDSEIRANQKFRDKATLTVDKSSTTAYMQLSSPTSEDSAVYYCARGTYDG | CH3C.35.23.3 with |
| | GFEYWGQGTTLTVSSASTKGPSVFPLAPSSKSTSGGTAALGCLVKDYFPEPVT | hole mutations |
| | VSWNSGALTSGVHTFPAVLQSSGLYSLSSVVTVPSSSLGTQTYICNVNHKPSN | |
| | TKVDKKVEPKSCDKTHTCPPCPAPELLGGPSVFLFPPKPKDTLMISRTPEVTCV | |
| | VVDVSHEDPEVKFNWYVDGVEVHNAKTKPREEQYNSTYRVVSVLTVLHQD | |
| | WLNGKEYKCKVSNKALPAPIEKTISKAKGQPREPQVYTLPPSRDELTKNQVSL | |
| | SCAVKGFYPSDIAVEWESYGTEWVNYKTTPPVLDSDGSFFLVSKLTVTKEEW | |
| | QQGFVFSCSVMHEALHNHYTQKSLSLSPGK | |
| 271 | QVQLQQPGAELVRPGASVKLSCKASGYSFTGYWMNWLKQRPGQGLEWIGMI | Anti-HER2_DI fused to |
| | HPSDSEIRANQKFRDKATLTVDKSSTTAYMQLSSPTSEDSAVYYCARGTYDG | CH3C.35.23.3 with |
| | GFEYWGQGTTLTVSSASTKGPSVFPLAPSSKSTSGGTAALGCLVKDYFPEPVT | hole and LALA |
| | VSWNSGALTSGVHTFPAVLQSSGLYSLSSVVTVPSSSLGTQTYICNVNHKPSN | mutations |
| | TKVDKKVEPKSCDKTHTCPPCPAPEAAGGPSVFLFPPKPKDTLMISRTPEVTC | |
| | VVVDVSHEDPEVKFNWYVDGVEVHNAKTKPREEQYNSTYRVVSVLTVLHQ | |
| | DWLNGKEYKCKVSNKALPAPIEKTISKAKGQPREPQVYTLPPSRDELTKNQVS | |
| | LSCAVKGFYPSDIAVEWESYGTEWVNYKTTPPVLDSDGSFFLVSKLTVTKEE | |
| | WQQGFVFSCSVMHEALHNHYTQKSLSLSPGK | |
| 272 | QVQLQQPGAELVRPGASVKLSCKASGYSFTGYWMNWLKQRPGQGLEWIGMI | Anti-HER2_DI fused to |
| | HPSDSEIRANQKFRDKATLTVDKSSTTAYMQLSSPTSEDSAVYYCARGTYDG | CH3C.35.23.3 with |
| | GFEYWGQGTTLTVSSASTKGPSVFPLAPSSKSTSGGTAALGCLVKDYFPEPVT | hole and M428L and |
| | VSWNSGALTSGVHTFPAVLQSSGLYSLSSVVTVPSSSLGTQTYICNVNHKPSN | N434S mutations |
| | TKVDKKVEPKSCDKTHTCPPCPAPELLGGPSVFLFPPKPKDTLMISRTPEVTCV | |
| | VVDVSHEDPEVKFNWYVDGVEVHNAKTKPREEQYNSTYRVVSVLTVLHQD | |
| | WLNGKEYKCKVSNKALPAPIEKTISKAKGQPREPQVYTLPPSRDELTKNQVSL | |
| | SCAVKGFYPSDIAVEWESYGTEWVNYKTTPPVLDSDGSFFLVSKLTVTKEEW | |
| | QQGFVFSCSVLHEALHSHYTQKSLSLSPGK | |
| 273 | QVQLQQPGAELVRPGASVKLSCKASGYSFTGYWMNWLKQRPGQGLEWIGMI | Anti-HER2_DI fused to |
| | HPSDSEIRANQKFRDKATLTVDKSSTTAYMQLSSPTSEDSAVYYCARGTYDG | CH3C.35.23.3 with |
| | GFEYWGQGTTLTVSSASTKGPSVFPLAPSSKSTSGGTAALGCLVKDYFPEPVT | hole, LALA, and |
| | VSWNSGALTSGVHTFPAVLQSSGLYSLSSVVTVPSSSLGTQTYICNVNHKPSN | M428L and N434S |
| | TKVDKKVEPKSCDKTHTCPPCPAPEAAGGPSVFLFPPKPKDTLMISRTPEVTC | mutations |
| | VVVDVSHEDPEVKFNWYVDGVEVHNAKTKPREEQYNSTYRVVSVLTVLHQ | |
| | DWLNGKEYKCKVSNKALPAPIEKTISKAKGQPREPQVYTLPPSRDELTKNQVS | |
| | LSCAVKGFYPSDIAVEWESYGTEWVNYKTTPPVLDSDGSFFLVSKLTVTKEE | |
| | WQQGFVFSCSVLHEALHSHYTQKSLSLSPGK | |
| 274 | QVQLQQPGAELVRPGASVKLSCKASGYSFTGYWMNWLKQRPGQGLEWIGMI | Anti-HER2_DI fused to |
| | HPSDSEIRANQKFRDKATLTVDKSSTTAYMQLSSPTSEDSAVYYCARGTYDG | CH3C.35.23.4 with |
| | GFEYWGQGTTLTVSSASTKGPSVFPLAPSSKSTSGGTAALGCLVKDYFPEPVT | knob mutation |
| | VSWNSGALTSGVHTFPAVLQSSGLYSLSSVVTVPSSSLGTQTYICNVNHKPSN | |
| | TKVDKKVEPKSCDKTHTCPPCPAPELLGGPSVFLFPPKPKDTLMISRTPEVTCV | |
| | VVDVSHEDPEVKFNWYVDGVEVHNAKTKPREEQYNSTYRVVSVLTVLHQD | |
| | WLNGKEYKCKVSNKALPAPIEKTISKAKGQPREPQVYTLPPSRDELTKNQVSL | |
| | WCLVKGFYPSDIAVEWESYGTEWSNYKTTPPVLDSDGSFFLYSKLTVSKEEW | |
| | QQGFVFSCSVMHEALHNHYTQKSLSLSPGK | |
| 275 | QVQLQQPGAELVRPGASVKLSCKASGYSFTGYWMNWLKQRPGQGLEWIGMI | Anti-HER2_DI fused to |
| | HPSDSEIRANQKFRDKATLTVDKSSTTAYMQLSSPTSEDSAVYYCARGTYDG | CH3C.35.23.4 with |
| | GFEYWGQGTTLTVSSASTKGPSVFPLAPSSKSTSGGTAALGCLVKDYFPEPVT | knob and LALA |
| | VSWNSGALTSGVHTFPAVLQSSGLYSLSSVVTVPSSSLGTQTYICNVNHKPSN | mutations |
| | TKVDKKVEPKSCDKTHTCPPCPAPEAAGGPSVFLFPPKPKDTLMISRTPEVTC | |
| | VVVDVSHEDPEVKFNWYVDGVEVHNAKTKPREEQYNSTYRVVSVLTVLHQ | |
| | DWLNGKEYKCKVSNKALPAPIEKTISKAKGQPREPQVYTLPPSRDELTKNQVS | |
| | LWCLVKGFYPSDIAVEWESYGTEWSNYKTTPPVLDSDGSFFLYSKLTVSKEE | |
| | WQQGFVFSCSVMHEALHNHYTQKSLSLSPGK | |
| 276 | QVQLQQPGAELVRPGASVKLSCKASGYSFTGYWMNWLKQRPGQGLEWIGMI | Anti-HER2_DI fused to |
| | HPSDSEIRANQKFRDKATLTVDKSSTTAYMQLSSPTSEDSAVYYCARGTYDG | CH3C.35.23.4 with |
| | GFEYWGQGTTLTVSSASTKGPSVFPLAPSSKSTSGGTAALGCLVKDYFPEPVT | knob and M428L and |
| | VSWNSGALTSGVHTFPAVLQSSGLYSLSSVVTVPSSSLGTQTYICNVNHKPSN | N434S mutations |
| | TKVDKKVEPKSCDKTHTCPPCPAPELLGGPSVFLFPPKPKDTLMISRTPEVTCV | |
| | VVDVSHEDPEVKFNWYVDGVEVHNAKTKPREEQYNSTYRVVSVLTVLHQD | |
| | WLNGKEYKCKVSNKALPAPIEKTISKAKGQPREPQVYTLPPSRDELTKNQVSL | |
| | WCLVKGFYPSDIAVEWESYGTEWSNYKTTPPVLDSDGSFFLYSKLTVSKEEW | |
| | QQGFVFSCSVLHEALHSHYTQKSLSLSPGK | |
| 277 | QVQLQQPGAELVRPGASVKLSCKASGYSFTGYWMNWLKQRPGQGLEWIGMI | Anti-HER2_DI fused to |
| | HPSDSEIRANQKFRDKATLTVDKSSTTAYMQLSSPTSEDSAVYYCARGTYDG | CH3C.35.23.4 with |
| | GFEYWGQGTTLTVSSASTKGPSVFPLAPSSKSTSGGTAALGCLVKDYFPEPVT | knob, LALA, and |
| | VSWNSGALTSGVHTFPAVLQSSGLYSLSSVVTVPSSSLGTQTYICNVNHKPSN | M428L and N434S |
| | TKVDKKVEPKSCDKTHTCPPCPAPEAAGGPSVFLFPPKPKDTLMISRTPEVTC | mutations |
| | VVVDVSHEDPEVKFNWYVDGVEVHNAKTKPREEQYNSTYRVVSVLTVLHQ | |
| | DWLNGKEYKCKVSNKALPAPIEKTISKAKGQPREPQVYTLPPSRDELTKNQVS | |
| | LWCLVKGFYPSDIAVEWESYGTEWSNYKTTPPVLDSDGSFFLYSKLTVSKEE | |
| | WQQGFVFSCSVLHEALHSHYTQKSLSLSPGK | |
| 278 | QVQLQQPGAELVRPGASVKLSCKASGYSFTGYWMNWLKQRPGQGLEWIGMI | Anti-HER2_DI fused to |
| | HPSDSEIRANQKFRDKATLTVDKSSTTAYMQLSSPTSEDSAVYYCARGTYDG | CH3C.35.23.4 with |
| | GFEYWGQGTTLTVSSASTKGPSVFPLAPSSKSTSGGTAALGCLVKDYFPEPVT | hole mutations |
| | VSWNSGALTSGVHTFPAVLQSSGLYSLSSVVTVPSSSLGTQTYICNVNHKPSN | |
| | TKVDKKVEPKSCDKTHTCPPCPAPELLGGPSVFLFPPKPKDTLMISRTPEVTCV | |
| | VVDVSHEDPEVKFNWYVDGVEVHNAKTKPREEQYNSTYRVVSVLTVLHQD | |
| | WLNGKEYKCKVSNKALPAPIEKTISKAKGQPREPQVYTLPPSRDELTKNQVSL | |
| | SCAVKGFYPSDIAVEWESYGTEWSNYKTTPPVLDSDGSFFLVSKLTVSKEEW | |
| | QQGFVFSCSVMHEALHNHYTQKSLSLSPGK | |
| 279 | QVQLQQPGAELVRPGASVKLSCKASGYSFTGYWMNWLKQRPGQGLEWIGMI | Anti-HER2_DI fused to |
| | HPSDSEIRANQKFRDKATLTVDKSSTTAYMQLSSPTSEDSAVYYCARGTYDG | CH3C.35.23.4 with |
| | GFEYWGQGTTLTVSSASTKGPSVFPLAPSSKSTSGGTAALGCLVKDYFPEPVT | hole and LALA |
| | VSWNSGALTSGVHTFPAVLQSSGLYSLSSVVTVPSSSLGTQTYICNVNHKPSN | mutations |
| | TKVDKKVEPKSCDKTHTCPPCPAPEAAGGPSVFLFPPKPKDTLMISRTPEVTC | |
| | VVVDVSHEDPEVKFNWYVDGVEVHNAKTKPREEQYNSTYRVVSVLTVLHQ | |
| | DWLNGKEYKCKVSNKALPAPIEKTISKAKGQPREPQVYTLPPSRDELTKNQVS | |
| | LSCAVKGFYPSDIAVEWESYGTEWSNYKTTPPVLDSDGSFFLVSKLTVSKEE | |
| | WQQGFVFSCSVMHEALHNHYTQKSLSLSPGK | |
| 280 | QVQLQQPGAELVRPGASVKLSCKASGYSFTGYWMNWLKQRPGQGLEWIGMI | Anti-HER2_DI fused to |
| | HPSDSEIRANQKFRDKATLTVDKSSTTAYMQLSSPTSEDSAVYYCARGTYDG | CH3C.35.23.4 with |
| | GFEYWGQGTTLTVSSASTKGPSVFPLAPSSKSTSGGTAALGCLVKDYFPEPVT | hole and M428L and |
| | VSWNSGALTSGVHTFPAVLQSSGLYSLSSVVTVPSSSLGTQTYICNVNHKPSN | N434S mutations |
| | TKVDKKVEPKSCDKTHTCPPCPAPELLGGPSVFLFPPKPKDTLMISRTPEVTCV | |
| | VVDVSHEDPEVKFNWYVDGVEVHNAKTKPREEQYNSTYRVVSVLTVLHQD | |
| | WLNGKEYKCKVSNKALPAPIEKTISKAKGQPREPQVYTLPPSRDELTKNQVSL | |
| | SCAVKGFYPSDIAVEWESYGTEWSNYKTTPPVLDSDGSFFLVSKLTVSKEEW | |
| | QQGFVFSCSVLHEALHSHYTQKSLSLSPGK | |
| 281 | QVQLQQPGAELVRPGASVKLSCKASGYSFTGYWMNWLKQRPGQGLEWIGMI | Anti-HER2_DI fused to |
| | HPSDSEIRANQKFRDKATLTVDKSSTTAYMQLSSPTSEDSAVYYCARGTYDG | CH3C.35.23.4 with |
| | GFEYWGQGTTLTVSSASTKGPSVFPLAPSSKSTSGGTAALGCLVKDYFPEPVT | hole, LALA, and |
| | VSWNSGALTSGVHTFPAVLQSSGLYSLSSVVTVPSSSLGTQTYICNVNHKPSN | M428L and N434S |
| | TKVDKKVEPKSCDKTHTCPPCPAPEAAGGPSVFLFPPKPKDTLMISRTPEVTC | mutations |
| | VVVDVSHEDPEVKFNWYVDGVEVHNAKTKPREEQYNSTYRVVSVLTVLHQ | |
| | DWLNGKEYKCKVSNKALPAPIEKTISKAKGQPREPQVYTLPPSRDELTKNQVS | |
| | LSCAVKGFYPSDIAVEWESYGTEWSNYKTTPPVLDSDGSFFLVSKLTVSKEE | |
| | WQQGFVFSCSVLHEALHSHYTQKSLSLSPGK | |
| 282 | QVQLQQPGAELVRPGASVKLSCKASGYSFTGYWMNWLKQRPGQGLEWIGMI | Anti-HER2_DI fused to |
| | HPSDSEIRANQKFRDKATLTVDKSSTTAYMQLSSPTSEDSAVYYCARGTYDG | CH3C.35.23 with knob |
| | GFEYWGQGTTLTVSSASTKGPSVFPLAPSSKSTSGGTAALGCLVKDYFPEPVT | mutation |
| | VSWNSGALTSGVHTFPAVLQSSGLYSLSSVVTVPSSSLGTQTYICNVNHKPSN | |
| | TKVDKKVEPKSCDKTHTCPPCPAPELLGGPSVFLFPPKPKDTLMISRTPEVTCV | |
| | VVDVSHEDPEVKFNWYVDGVEVHNAKTKPREEQYNSTYRVVSVLTVLHQD | |
| | WLNGKEYKCKVSNKALPAPIEKTISKAKGQPREPQVYTLPPSRDELTKNQVSL | |
| | WCLVKGFYPSDIAVEWESYGTEWSNYKTTPPVLDSDGSFFLYSKLTVTKEEW | |
| | QQGFVFSCSVMHEALHNHYTQKSLSLSPGK | |
| 283 | QVQLQQPGAELVRPGASVKLSCKASGYSFTGYWMNWLKQRPGQGLEWIGMI | Anti-HER2_DI fused to |
| | HPSDSEIRANQKFRDKATLTVDKSSTTAYMQLSSPTSEDSAVYYCARGTYDG | CH3C.35.23 with knob |
| | GFEYWGQGTTLTVSSASTKGPSVFPLAPSSKSTSGGTAALGCLVKDYFPEPVT | and LALA mutations |
| | VSWNSGALTSGVHTFPAVLQSSGLYSLSSVVTVPSSSLGTQTYICNVNHKPSN | |
| | TKVDKKVEPKSCDKTHTCPPCPAPEAAGGPSVFLFPPKPKDTLMISRTPEVTC | |
| | VVVDVSHEDPEVKFNWYVDGVEVHNAKTKPREEQYNSTYRVVSVLTVLHQ | |
| | DWLNGKEYKCKVSNKALPAPIEKTISKAKGQPREPQVYTLPPSRDELTKNQVS | |
| | LWCLVKGFYPSDIAVEWESYGTEWSNYKTTPPVLDSDGSFFLYSKLTVTKEE | |
| | WQQGFVFSCSVMHEALHNHYTQKSLSLSPGK | |
| 284 | QVQLQQPGAELVRPGASVKLSCKASGYSFTGYWMNWLKQRPGQGLEWIGMI | Anti-HER2_DI fused to |
| | HPSDSEIRANQKFRDKATLTVDKSSTTAYMQLSSPTSEDSAVYYCARGTYDG | CH3C.35.23 with knob |
| | GFEYWGQGTTLTVSSASTKGPSVFPLAPSSKSTSGGTAALGCLVKDYFPEPVT | and M428L and N434S |
| | VSWNSGALTSGVHTFPAVLQSSGLYSLSSVVTVPSSSLGTQTYICNVNHKPSN | mutations |
| | TKVDKKVEPKSCDKTHTCPPCPAPELLGGPSVFLFPPKPKDTLMISRTPEVTCV | |
| | VVDVSHEDPEVKFNWYVDGVEVHNAKTKPREEQYNSTYRVVSVLTVLHQD | |
| | WLNGKEYKCKVSNKALPAPIEKTISKAKGQPREPQVYTLPPSRDELTKNQVSL | |
| | WCLVKGFYPSDIAVEWESYGTEWSNYKTTPPVLDSDGSFFLYSKLTVTKEEW | |
| | QQGFVFSCSVLHEALHSHYTQKSLSLSPGK | |
| 285 | QVQLQQPGAELVRPGASVKLSCKASGYSFTGYWMNWLKQRPGQGLEWIGMI | Anti-HER2_DI fused to |
| | HPSDSEIRANQKFRDKATLTVDKSSTTAYMQLSSPTSEDSAVYYCARGTYDG | CH3C.35.23 with knob, |
| | GFEYWGQGTTLTVSSASTKGPSVFPLAPSSKSTSGGTAALGCLVKDYFPEPVT | LALA, and M428L and |
| | VSWNSGALTSGVHTFPAVLQSSGLYSLSSVVTVPSSSLGTQTYICNVNHKPSN | N434S mutations |
| | TKVDKKVEPKSCDKTHTCPPCPAPEAAGGPSVFLFPPKPKDTLMISRTPEVTC | |
| | VVVDVSHEDPEVKFNWYVDGVEVHNAKTKPREEQYNSTYRVVSVLTVLHQ | |
| | DWLNGKEYKCKVSNKALPAPIEKTISKAKGQPREPQVYTLPPSRDELTKNQVS | |
| | LWCLVKGFYPSDIAVEWESYGTEWSNYKTTPPVLDSDGSFFLYSKLTVTKEE | |
| | WQQGFVFSCSVLHEALHSHYTQKSLSLSPGK | |
| 286 | QVQLQQPGAELVRPGASVKLSCKASGYSFTGYWMNWLKQRPGQGLEWIGMI | Anti-HER2_DI fused to |
| | HPSDSEIRANQKFRDKATLTVDKSSTTAYMQLSSPTSEDSAVYYCARGTYDG | CH3C.35.23 with hole |
| | GFEYWGQGTTLTVSSASTKGPSVFPLAPSSKSTSGGTAALGCLVKDYFPEPVT | mutations |
| | VSWNSGALTSGVHTFPAVLQSSGLYSLSSVVTVPSSSLGTQTYICNVNHKPSN | |
| | TKVDKKVEPKSCDKTHTCPPCPAPELLGGPSVFLFPPKPKDTLMISRTPEVTCV | |
| | VVDVSHEDPEVKFNWYVDGVEVHNAKTKPREEQYNSTYRVVSVLTVLHQD | |
| | WLNGKEYKCKVSNKALPAPIEKTISKAKGQPREPQVYTLPPSRDELTKNQVSL | |
| | SCAVKGFYPSDIAVEWESYGTEWSNYKTTPPVLDSDGSFFLVSKLTVTKEEW | |
| | QQGFVFSCSVMHEALHNHYTQKSLSLSPGK | |
| 287 | QVQLQQPGAELVRPGASVKLSCKASGYSFTGYWMNWLKQRPGQGLEWIGMI | Anti-HER2_DI fused to |
| | HPSDSEIRANQKFRDKATLTVDKSSTTAYMQLSSPTSEDSAVYYCARGTYDG | CH3C.35.23 with hole |
| | GFEYWGQGTTLTVSSASTKGPSVFPLAPSSKSTSGGTAALGCLVKDYFPEPVT | and LALA mutations |
| | VSWNSGALTSGVHTFPAVLQSSGLYSLSSVVTVPSSSLGTQTYICNVNHKPSN | |
| | TKVDKKVEPKSCDKTHTCPPCPAPEAAGGPSVFLFPPKPKDTLMISRTPEVTC | |
| | VVVDVSHEDPEVKFNWYVDGVEVHNAKTKPREEQYNSTYRVVSVLTVLHQ | |
| | DWLNGKEYKCKVSNKALPAPIEKTISKAKGQPREPQVYTLPPSRDELTKNQVS | |
| | LSCAVKGFYPSDIAVEWESYGTEWSNYKTTPPVLDSDGSFFLVSKLTVTKEE | |
| | WQQGFVFSCSVMHEALHNHYTQKSLSLSPGK | |
| 288 | QVQLQQPGAELVRPGASVKLSCKASGYSFTGYWMNWLKQRPGQGLEWIGMI | Anti-HER2_DI fused to |
| | HPSDSEIRANQKFRDKATLTVDKSSTTAYMQLSSPTSEDSAVYYCARGTYDG | CH3C.35.23 with hole |
| | GFEYWGQGTTLTVSSASTKGPSVFPLAPSSKSTSGGTAALGCLVKDYFPEPVT | and M428L and N434S |
| | VSWNSGALTSGVHTFPAVLQSSGLYSLSSVVTVPSSSLGTQTYICNVNHKPSN | mutations |
| | TKVDKKVEPKSCDKTHTCPPCPAPELLGGPSVFLFPPKPKDTLMISRTPEVTCV | |
| | VVDVSHEDPEVKFNWYVDGVEVHNAKTKPREEQYNSTYRVVSVLTVLHQD | |
| | WLNGKEYKCKVSNKALPAPIEKTISKAKGQPREPQVYTLPPSRDELTKNQVSL | |
| | SCAVKGFYPSDIAVEWESYGTEWSNYKTTPPVLDSDGSFFLVSKLTVTKEEW | |
| | QQGFVFSCSVLHEALHSHYTQKSLSLSPGK | |
| 289 | QVQLQQPGAELVRPGASVKLSCKASGYSFTGYWMNWLKQRPGQGLEWIGMI | Anti-HER2_DI fused to |
| | HPSDSEIRANQKFRDKATLTVDKSSTTAYMQLSSPTSEDSAVYYCARGTYDG | CH3C.35.23 with hole, |
| | GFEYWGQGTTLTVSSASTKGPSVFPLAPSSKSTSGGTAALGCLVKDYFPEPVT | LALA, and M428L and |
| | VSWNSGALTSGVHTFPAVLQSSGLYSLSSVVTVPSSSLGTQTYICNVNHKPSN | N434S mutations |
| | TKVDKKVEPKSCDKTHTCPPCPAPEAAGGPSVFLFPPKPKDTLMISRTPEVTC | |
| | VVVDVSHEDPEVKFNWYVDGVEVHNAKTKPREEQYNSTYRVVSVLTVLHQ | |
| | DWLNGKEYKCKVSNKALPAPIEKTISKAKGQPREPQVYTLPPSRDELTKNQVS | |
| | LSCAVKGFYPSDIAVEWESYGTEWSNYKTTPPVLDSDGSFFLVSKLTVTKEE | |
| | WQQGFVFSCSVLHEALHSHYTQKSLSLSPGK | |
| 290 | QVQLQQPGAELVRPGASVKLSCKASGYSFTGYWMNWLKQRPGQGLEWIGMI | Anti-HER2_DI fused to |
| | HPSDSEIRANQKFRDKATLTVDKSSTTAYMQLSSPTSEDSAVYYCARGTYDG | Fc with hole mutations |
| | GFEYWGQGTTLTVSSASTKGPSVFPLAPSSKSTSGGTAALGCLVKDYFPEPVT | |
| | VSWNSGALTSGVHTFPAVLQSSGLYSLSSVVTVPSSSLGTQTYICNVNHKPSN | |
| | TKVDKKVEPKSCDKTHTCPPCPAPELLGGPSVFLFPPKPKDTLMISRTPEVTCV | |
| | VVDVSHEDPEVKFNWYVDGVEVHNAKTKPREEQYNSTYRVVSVLTVLHQD | |
| | WLNGKEYKCKVSNKALPAPIEKTISKAKGQPREPQVYTLPPSRDELTKNQVSL | |
| | SCAVKGFYPSDIAVEWESNGQPENNYKTTPPVLDSDGSFFLVSKLTVDKSRW | |
| | QQGNVFSCSVMHEALHNHYTQKSLSLSPGK | |
| 291 | QVQLQQPGAELVRPGASVKLSCKASGYSFTGYWMNWLKQRPGQGLEWIGMI | Anti-HER2_DI fused to |
| | HPSDSEIRANQKFRDKATLTVDKSSTTAYMQLSSPTSEDSAVYYCARGTYDG | Fc with hole and |
| | GFEYWGQGTTLTVSSASTKGPSVFPLAPSSKSTSGGTAALGCLVKDYFPEPVT | M428L and N434S |
| | VSWNSGALTSGVHTFPAVLQSSGLYSLSSVVTVPSSSLGTQTYICNVNHKPSN | mutations |
| | TKVDKKVEPKSCDKTHTCPPCPAPELLGGPSVFLFPPKPKDTLMISRTPEVTCV | |
| | VVDVSHEDPEVKFNWYVDGVEVHNAKTKPREEQYNSTYRVVSVLTVLHQD | |
| | WLNGKEYKCKVSNKALPAPIEKTISKAKGQPREPQVYTLPPSRDELTKNQVSL | |
| | SCAVKGFYPSDIAVEWESNGQPENNYKTTPPVLDSDGSFFLVSKLTVDKSRW | |
| | QQGNVFSCSVLHEALHSHYTQKSLSLSPGK | |
| 292 | QVQLQQPGAELVRPGASVKLSCKASGYSFTGYWMNWLKQRPGQGLEWIGMI | Anti-HER2_DI fused to |
| | HPSDSEIRANQKFRDKATLTVDKSSTTAYMQLSSPTSEDSAVYYCARGTYDG | Fc with hole, LALA, |
| | GFEYWGQGTTLTVSSASTKGPSVFPLAPSSKSTSGGTAALGCLVKDYFPEPVT | and M428L and N434S |
| | VSWNSGALTSGVHTFPAVLQSSGLYSLSSVVTVPSSSLGTQTYICNVNHKPSN | mutations |
| | TKVDKKVEPKSCDKTHTCPPCPAPEAAGGPSVFLFPPKPKDTLMISRTPEVTC | |
| | VVVDVSHEDPEVKFNWYVDGVEVHNAKTKPREEQYNSTYRVVSVLTVLHQ | |
| | DWLNGKEYKCKVSNKALPAPIEKTISKAKGQPREPQVYTLPPSRDELTKNQVS | |
| | LSCAVKGFYPSDIAVEWESNGQPENNYKTTPPVLDSDGSFFLVSKLTVDKSR | |
| | WQQGNVFSCSVLHEALHSHYTQKSLSLSPGK | |
| 293 | DIVLTQSPASLVVSLGQRATISCRASQSVSGSRFTYMHWYQQKPGQPPKLLIK | Anti-HER2_DI light |
| | YASILESGVPARFSGGGSGTDFTLNIHPVEEDDTATYYCQHSWEIPPWTFGGG | chain |
| | TKLEIKRTVAAPSVFIFPPSDEQLKSGTASVVCLLNNFYPREAKVQWKVDNAL | |
| | QSGNSQESVTEQDSKDSTYSLSSTLTLSKADYEKHKVYACEVTHQGLSSPVTK | |
| | SFNRGEC | |
| 294 | QVQLQQPGAELVRPGASVKLSCKASGYSFTGYWMNWLKQRPGQGLEWIGMI | Anti-HER2_DI fused to |
| | HPSDSEIRANQKFRDKATLTVDKSSTTAYMQLSSPTSEDSAVYYCARGTYDG | Fc with knob mutation |
| | GFEYWGQGTTLTVSSASTKGPSVFPLAPSSKSTSGGTAALGCLVKDYFPEPVT | |
| | VSWNSGALTSGVHTFPAVLQSSGLYSLSSVVTVPSSSLGTQTYICNVNHKPSN | |
| | TKVDKKVEPKSCDKTHTCPPCPAPELLGGPSVFLFPPKPKDTLMISRTPEVTCV | |
| | VVDVSHEDPEVKFNWYVDGVEVHNAKTKPREEQYNSTYRVVSVLTVLHQD | |
| | WLNGKEYKCKVSNKALPAPIEKTISKAKGQPREPQVYTLPPSRDELTKNQVSL | |
| | WCLVKGFYPSDIAVEWESNGQPENNYKTTPPVLDSDGSFFLYSKLTVDKSRW | |
| | QQGNVFSCSVMHEALHNHYTQKSLSLSPGK | |
| 295 | QVQLQQPGAELVRPGASVKLSCKASGYSFTGYWMNWLKQRPGQGLEWIGMI | Anti-HER2_DI fused to |
| | HPSDSEIRANQKFRDKATLTVDKSSTTAYMQLSSPTSEDSAVYYCARGTYDG | Fc with knob and |
| | GFEYWGQGTTLTVSSASTKGPSVFPLAPSSKSTSGGTAALGCLVKDYFPEPVT | M428L and N434S |
| | VSWNSGALTSGVHTFPAVLQSSGLYSLSSVVTVPSSSLGTQTYICNVNHKPSN | mutations |
| | TKVDKKVEPKSCDKTHTCPPCPAPELLGGPSVFLFPPKPKDTLMISRTPEVTCV | |
| | VVDVSHEDPEVKFNWYVDGVEVHNAKTKPREEQYNSTYRVVSVLTVLHQD | |
| | WLNGKEYKCKVSNKALPAPIEKTISKAKGQPREPQVYTLPPSRDELTKNQVSL | |
| | WCLVKGFYPSDIAVEWESNGQPENNYKTTPPVLDSDGSFFLYSKLTVDKSRW | |
| | QQGNVFSCSVLHEALHSHYTQKSLSLSPGK | |
| 296 | EVQLVESGGGLVQPGGSLRLSCAASGFNIKDTYIHWVRQAPGKGLEWVARIY | Anti-HER2_DIV fused |
| | PTNGYTRYADSVKGRFTISADTSKNTAYLQMNSLRAEDTAVYYCSRWGGDG | to Fc with knob and |
| | FYAMDYWGQGTLVTVSSASTKGPSVFPLAPSSKSTSGGTAALGCLVKDYFPE | LALA mutations |
| | PVTVSWNSGALTSGVHTFPAVLQSSGLYSLSSVVTVPSSSLGTQTYICNVNHK | |
| | PSNTKVDKKVEPKSCDKTHTCPPCPAPEAAGGPSVFLFPPKPKDTLMISRTPEV | |
| | TCVVVDVSHEDPEVKFNWYVDGVEVHNAKTKPREEQYNSTYRVVSVLTVLH | |
| | QDWLNGKEYKCKVSNKALPAPIEKTISKAKGQPREPQVYTLPPSRDELTKNQ | |
| | VSLWCLVKGFYPSDIAVEWESNGQPENNYKTTPPVLDSDGSFFLYSKLTVDK | |
| | SRWQQGNVFSCSVMHEALHNHYTQKSLSLSPGK | |
| 297 | EVQLVESGGGLVQPGGSLRLSCAASGFTFTDYTMDWVRQAPGKGLEWVAD | Anti-HER2_DII fused |
| | VNPNSGGSIYNQRFKGRFTLSVDRSKNTLYLQMNSLRAEDTAVYYCARNLGP | to Fc with knob and |
| | SFYFDYWGQGTLVTVSSASTKGPSVFPLAPSSKSTSGGTAALGCLVKDYFPEP | LALA mutations |
| | VTVSWNSGALTSGVHTFPAVLQSSGLYSLSSVVTVPSSSLGTQTYICNVNHKP | |
| | SNTKVDKKVEPKSCDKTHTCPPCPAPEAAGGPSVFLFPPKPKDTLMISRTPEV | |
| | TCVVVDVSHEDPEVKFNWYVDGVEVHNAKTKPREEQYNSTYRVVSVLTVLH | |
| | QDWLNGKEYKCKVSNKALPAPIEKTISKAKGQPREPQVYTLPPSRDELTKNQ | |
| | VSLWCLVKGFYPSDIAVEWESNGQPENNYKTTPPVLDSDGSFFLYSKLTVDK | |
| | SRWQQGNVFSCSVMHEALHNHYTQKSLSLSPGK | |
| 298 | QVQLQQPGAELVRPGASVKLSCKASGYSFTGYWMNWLKQRPGQGLEWIGMI | Anti-HER2_DI fused to |
| | HPSDSEIRANQKFRDKATLTVDKSSTTAYMQLSSPTSEDSAVYYCARGTYDG | Fc with knob and |
| | GFEYWGQGTTLTVSSASTKGPSVFPLAPSSKSTSGGTAALGCLVKDYFPEPVT | LALA mutations |
| | VSWNSGALTSGVHTFPAVLQSSGLYSLSSVVTVPSSSLGTQTYICNVNHKPSN | |
| | TKVDKKVEPKSCDKTHTCPPCPAPEAAGGPSVFLFPPKPKDTLMISRTPEVTC | |
| | VVVDVSHEDPEVKFNWYVDGVEVHNAKTKPREEQYNSTYRVVSVLTVLHQ | |
| | DWLNGKEYKCKVSNKALPAPIEKTISKAKGQPREPQVYTLPPSRDELTKNQVS | |
| | LWCLVKGFYPSDIAVEWESNGQPENNYKTTPPVLDSDGSFFLYSKLTVDKSR | |
| | WQQGNVFSCSVMHEALHNHYTQKSLSLSPGK | |
| 299 | EVQLVESGGGLVQPGGSLRLSCAASGFNIKDTYIHWVRQAPGKGLEWVARIY | Anti-HER2_DIV fused |
| | PTNGYTRYADSVKGRFTISADTSKNTAYLQMNSLRAEDTAVYYCSRWGGDG | to Fc with knob, |
| | FYAMDYWGQGTLVTVSSASTKGPSVFPLAPSSKSTSGGTAALGCLVKDYFPE | LAAL, and M428L and |
| | PVTVSWNSGALTSGVHTFPAVLQSSGLYSLSSVVTVPSSSLGTQTYICNVNHK | N434S mutations |
| | PSNTKVDKKVEPKSCDKTHTCPPCPAPEAAGGPSVFLFPPKPKDTLMISRTPEV | |
| | TCVVVDVSHEDPEVKFNWYVDGVEVHNAKTKPREEQYNSTYRVVSVLTVLH | |
| | QDWLNGKEYKCKVSNKALPAPIEKTISKAKGQPREPQVYTLPPSRDELTKNQ | |
| | VSLWCLVKGFYPSDIAVEWESNGQPENNYKTTPPVLDSDGSFFLYSKLTVDK | |
| | SRWQQGNVFSCSVLHEALHSHYTQKSLSLSPGK | |
| 300 | EVQLVESGGGLVQPGGSLRLSCAASGFTFTDYTMDWVRQAPGKGLEWVAD | Anti-HER2_DII fused |
| | VNPNSGGSIYNQRFKGRFTLSVDRSKNTLYLQMNSLRAEDTAVYYCARNLGP | to Fc with knob, |
| | SFYFDYWGQGTLVTVSSASTKGPSVFPLAPSSKSTSGGTAALGCLVKDYFPEP | LALA, and M428L and |
| | VTVSWNSGALTSGVHTFPAVLQSSGLYSLSSVVTVPSSSLGTQTYICNVNHKP | N434S mutations |
| | SNTKVDKKVEPKSCDKTHTCPPCPAPEAAGGPSVFLFPPKPKDTLMISRTPEV | |
| | TCVVVDVSHEDPEVKFNWYVDGVEVHNAKTKPREEQYNSTYRVVSVLTVLH | |
| | QDWLNGKEYKCKVSNKALPAPIEKTISKAKGQPREPQVYTLPPSRDELTKNQ | |
| | VSLWCLVKGFYPSDIAVEWESNGQPENNYKTTPPVLDSDGSFFLYSKLTVDK | |
| | SRWQQGNVFSCSVLHEALHSHYTQKSLSLSPGK | |
| 301 | QVQLQQPGAELVRPGASVKLSCKASGYSFTGYWMNWLKQRPGQGLEWIGMI | Anti-HER2_DI fused to |
| | HPSDSEIRANQKFRDKATLTVDKSSTTAYMQLSSPTSEDSAVYYCARGTYDG | Fc with knob, LALA, |
| | GFEYWGQGTTLTVSSASTKGPSVFPLAPSSKSTSGGTAALGCLVKDYFPEPVT | M428L and N434S and |
| | VSWNSGALTSGVHTFPAVLQSSGLYSLSSVVTVPSSSLGTQTYICNVNHKPSN | mutations |
| | TKVDKKVEPKSCDKTHTCPPCPAPEAAGGPSVFLFPPKPKDTLMISRTPEVTC | |
| | VVVDVSHEDPEVKFNWYVDGVEVHNAKTKPREEQYNSTYRVVSVLTVLHQ | |
| | DWLNGKEYKCKVSNKALPAPIEKTISKAKGQPREPQVYTLPPSRDELTKNQVS | |
| | LWCLVKGFYPSDIAVEWESNGQPENNYKTTPPVLDSDGSFFLYSKLTVDKSR | |
| | WQQGNVFSCSVLHEALHSHYTQKSLSLSPGK | |
| 302 | EVQLVESGGGLVQPGGSLRLSCAASGFNIKDTYIHWVRQAPGKGLEWVARIY | Anti-HER2_DIV fused |
| | PTNGYTRYADSVKGRFTISADTSKNTAYLQMNSLRAEDTAVYYCSRWGGDG | to Fc with hole and |
| | FYAMDYWGQGTLVTVSSASTKGPSVFPLAPSSKSTSGGTAALGCLVKDYFPE | LALA mutations |
| | PVTVSWNSGALTSGVHTFPAVLQSSGLYSLSSVVTVPSSSLGTQTYICNVNHK | |
| | PSNTKVDKKVEPKSCDKTHTCPPCPAPEAAGGPSVFLFPPKPKDTLMISRTPEV | |
| | TCVVVDVSHEDPEVKFNWYVDGVEVHNAKTKPREEQYNSTYRVVSVLTVLH | |
| | QDWLNGKEYKCKVSNKALPAPIEKTISKAKGQPREPQVYTLPPSRDELTKNQ | |
| | VSLSCAVKGFYPSDIAVEWESNGQPENNYKTTPPVLDSDGSFFLVSKLTVDKS | |
| | RWQQGNVFSCSVMHEALHNHYTQKSLSLSPGK | |
| 303 | EVQLVESGGGLVQPGGSLRLSCAASGFTFTDYTMDWVRQAPGKGLEWVAD | Anti-HER2_DII fused |
| | VNPNSGGSIYNQRFKGRFTLSVDRSKNTLYLQMNSLRAEDTAVYYCARNLGP | to Fc with hole and |
| | SFYFDYWGQGTLVTVSSASTKGPSVFPLAPSSKSTSGGTAALGCLVKDYFPEP | LALA mutations |
| | VTVSWNSGALTSGVHTFPAVLQSSGLYSLSSVVTVPSSSLGTQTYICNVNHKP | |
| | SNTKVDKKVEPKSCDKTHTCPPCPAPEAAGGPSVFLFPPKPKDTLMISRTPEV | |
| | TCVVVDVSHEDPEVKFNWYVDGVEVHNAKTKPREEQYNSTYRVVSVLTVLH | |
| | QDWLNGKEYKCKVSNKALPAPIEKTISKAKGQPREPQVYTLPPSRDELTKNQ | |
| | VSLSCAVKGFYPSDIAVEWESNGQPENNYKTTPPVLDSDGSFFLVSKLTVDKS | |
| | RWQQGNVFSCSVMHEALHNHYTQKSLSLSPGK | |
| 304 | QVQLQQPGAELVRPGASVKLSCKASGYSFTGYWMNWLKQRPGQGLEWIGMI | Anti-HER2_DI fused to |
| | HPSDSEIRANQKFRDKATLTVDKSSTTAYMQLSSPTSEDSAVYYCARGTYDG | Fc with hole and LALA |
| | GFEYWGQGTTLTVSSASTKGPSVFPLAPSSKSTSGGTAALGCLVKDYFPEPVT | mutations |
| | VSWNSGALTSGVHTFPAVLQSSGLYSLSSVVTVPSSSLGTQTYICNVNHKPSN | |
| | TKVDKKVEPKSCDKTHTCPPCPAPEAAGGPSVFLFPPKPKDTLMISRTPEVTC | |
| | VVVDVSHEDPEVKFNWYVDGVEVHNAKTKPREEQYNSTYRVVSVLTVLHQ | |
| | DWLNGKEYKCKVSNKALPAPIEKTISKAKGQPREPQVYTLPPSRDELTKNQVS | |
| | LSCAVKGFYPSDIAVEWESNGQPENNYKTTPPVLDSDGSFFLVSKLTVDKSR | |
| | WQQGNVFSCSVMHEALHNHYTQKSLSLSPGK | |
| 305 | EVQLVESGGGLVQPGGSLRLSCAASGFNIKDTYIHWVRQAPGKGLEWVARIY | Anti-HER2_DIV fused |
| | PTNGYTRYADSVKGRFTISADTSKNTAYLQMNSLRAEDTAVYYCSRWGGDG | to Fc with hole, LALA, |
| | FYAMDYWGQGTLVTVSSASTKGPSVFPLAPSSKSTSGGTAALGCLVKDYFPE | and M428L and N434S |
| | PVTVSWNSGALTSGVHTFPAVLQSSGLYSLSSVVTVPSSSLGTQTYICNVNHK | mutations |
| | PSNTKVDKKVEPKSCDKTHTCPPCPAPEAAGGPSVFLFPPKPKDTLMISRTPEV | |
| | TCVVVDVSHEDPEVKFNWYVDGVEVHNAKTKPREEQYNSTYRVVSVLTVLH | |
| | QDWLNGKEYKCKVSNKALPAPIEKTISKAKGQPREPQVYTLPPSRDELTKNQ | |
| | VSLSCAVKGFYPSDIAVEWESNGQPENNYKTTPPVLDSDGSFFLVSKLTVDKS | |
| | RWQQGNVFSCSVLHEALHSHYTQKSLSLSPGK | |
| 306 | EVQLVESGGGLVQPGGSLRLSCAASGFTFTDYTMDWVRQAPGKGLEWVAD | Anti-HER2_DII fused |
| | VNPNSGGSIYNQRFKGRFTLSVDRSKNTLYLQMNSLRAEDTAVYYCARNLGP | to Fc with hole, LALA, |
| | SFYFDYWGQGTLVTVSSASTKGPSVFPLAPSSKSTSGGTAALGCLVKDYFPEP | and M428L and N434S |
| | VTVSWNSGALTSGVHTFPAVLQSSGLYSLSSVVTVPSSSLGTQTYICNVNHKP | mutations |
| | SNTKVDKKVEPKSCDKTHTCPPCPAPEAAGGPSVFLFPPKPKDTLMISRTPEV | |
| | TCVVVDVSHEDPEVKFNWYVDGVEVHNAKTKPREEQYNSTYRVVSVLTVLH | |
| | QDWLNGKEYKCKVSNKALPAPIEKTISKAKGQPREPQVYTLPPSRDELTKNQ | |
| | VSLSCAVKGFYPSDIAVEWESNGQPENNYKTTPPVLDSDGSFFLVSKLTVDKS | |
| | RWQQGNVFSCSVLHEALHSHYTQKSLSLSPGK | |
| 307 | QVQLQQPGAELVRPGASVKLSCKASGYSFTGYWMNWLKQRPGQGLEWIGMI | Anti-HER2_DI HC |
| | HPSDSEIRANQKFRDKATLTVDKSSTTAYMQLSSPTSEDSAVYYCARGTYDG | with wild-type human |
| | GFEYWGQGTTLTVSSASTKGPSVFPLAPSSKSTSGGTAALGCLVKDYFPEPVT | Fc |
| | VSWNSGALTSGVHTFPAVLQSSGLYSLSSVVTVPSSSLGTQTYICNVNHKPSN | |
| | TKVDKKVEPKSCDKTHTCPPCPAPELLGGPSVFLFPPKPKDTLMISRTPEVTCV | |
| | VVDVSHEDPEVKFNWYVDGVEVHNAKTKPREEQYNSTYRVVSVLTVLHQD | |
| | WLNGKEYKCKVSNKALPAPIEKTISKAKGQPREPQVYTLPPSRDELTKNQVSL | |
| | TCLVKGFYPSDIAVEWESNGQPENNYKTTPPVLDSDGSFFLYSKLTVDKSRW | |
| | QQGNVFSCSVMHEALHNHYTQKSLSLSPGK | |
| 308 | EVQLVESGGGLVQPGGSLRLSCAASGFNIKDTYIHWVRQAPGKGLEWVARIY | Fd of Anti-HER2_DIV |
| | PTNGYTRYADSVKGRFTISADTSKNTAYLQMNSLRAEDTAVYYCSRWGGDG | HC |
| | FYAMDYWGQGTLVTVSSASTKGPSVFPLAPSSKSTSGGTAALGCLVKDYFPE | |
| | PVTVSWNSGALTSGVHTFPAVLQSSGLYSLSSVVTVPSSSLGTQTYICNVNHK | |
| | PSNTKVDKKVEPKSCDKTHT | |
| 309 | EVQLVESGGGLVQPGGSLRLSCAASGFTFTDYTMDWVRQAPGKGLEWVAD | Fd of Anti-HER2_DII |
| | VNPNSGGSIYNQRFKGRFTLSVDRSKNTLYLQMNSLRAEDTAVYYCARNLGP | HC |
| | SFYFDYWGQGTLVTVSSASTKGPSVFPLAPSSKSTSGGTAALGCLVKDYFPEP | |
| | VTVSWNSGALTSGVHTFPAVLQSSGLYSLSSVVTVPSSSLGTQTYICNVNHKP | |
| | SNTKVDKKVEPKSCDKTHT | |
| 310 | QVQLQQPGAELVRPGASVKLSCKASGYSFTGYWMNWLKQRPGQGLEWIGMI | Fd of Anti-HER2_DI |
| | HPSDSEIRANQKFRDKATLTVDKSSTTAYMQLSSPTSEDSAVYYCARGTYDG | HC |
| | GFEYWGQGTTLTVSSASTKGPSVFPLAPSSKSTSGGTAALGCLVKDYFPEPVT | |
| | VSWNSGALTSGVHTFPAVLQSSGLYSLSSVVTVPSSSLGTQTYICNVNHKPSN | |
| | TKVDKKVEPKSCDKTHT | |
| 311 | QVQLVESGGGVVQPGRSLRLSCAASGFAFSSYGMHWVRQAPGKGLEWVAVI | Control fused to |
| | WFDGTKKYYTDSVKGRFTISRDNSKNTLYLQMNTLRAEDTAVYYCARDRGI | CH3C.35.23.4 with |
| | GARRGPYYMDVWGKGTTVTVSSASTKGPSVFPLAPSSKSTSGGTAALGCLVK | knob and LALA |
| | DYFPEPVTVSWNSGALTSGVHTFPAVLQSSGLYSLSSVVTVPSSSLGTQTYICN | mutations (ATV:ctrl |
| | VNHKPSNTKVDKKVEPKSCDKTHTCPPCPAPEAAGGPSVFLFPPKPKDTLMIS | HC1) |
| | RTPEVTCVVVDVSHEDPEVKFNWYVDGVEVHNAKTKPREEQYNSTYRVVSV | |
| | LTVLHQDWLNGKEYKCKVSNKALPAPIEKTISKAKGQPREPQVYTLPPSRDEL | |
| | TKNQVSLWCLVKGFYPSDIAVEWESYGTEWSNYKTTPPVLDSDGSFFLYSKL | |
| | TVSKEEWQQGFVFSCSVMHEALHNHYTQKSLSLSPGK | |
| 312 | QVQLVESGGGVVQPGRSLRLSCAASGFAFSSYGMHWVRQAPGKGLEWVAVI | Control fused to Fc |
| | WFDGTKKYYTDSVKGRFTISRDNSKNTLYLQMNTLRAEDTAVYYCARDRGI | with hole mutations |
| | GARRGPYYMDVWGKGTTVTVSSASTKGPSVFPLAPSSKSTSGGTAALGCLVK | (ATV:ctrl HC2) |
| | DYFPEPVTVSWNSGALTSGVHTFPAVLQSSGLYSLSSVVTVPSSSLGTQTYICN | |
| | VNHKPSNTKVDKKVEPKSCDKTHTCPPCPAPELLGGPSVFLFPPKPKDTLMIS | |
| | RTPEVTCVVVDVSHEDPEVKFNWYVDGVEVHNAKTKPREEQYNSTYRVVSV | |
| | LTVLHQDWLNGKEYKCKVSNKALPAPIEKTISKAKGQPREPQVYTLPPSRDEL | |
| | TKNQVSLSCAVKGFYPSDIAVEWESNGQPENNYKTTPPVLDSDGSFFLVSKLT | |
| | VDKSRWQQGNVFSCSVMHEALHNHYTQKSLSLSPGK | |
| 313 | DIQMTQSPSSLSASVGDRVTITCRASQSISSYLNWYQQKPGKAPKLLIYAASSL | Control light chain |
| | QSGVPSRFSGSGSGTDFTLTISSLQPEDFATYYCQQSYSTPLTFGGGTKVEIKR | (ATV:ctrl LC) |
| | TVAAPSVFIFPPSDEQLKSGTASVVCLLNNFYPREAKVQWKVDNALQSGNSQ | |
| | ESVTEQDSKDSTYSLSSTLTLSKADYEKHKVYACEVTHQGLSSPVTKSFNRGE | |
| | C | |

1. An Fc polypeptide dimer-antibody variable region fusion protein comprising:
(a) an antibody variable region that is capable of binding human epidermal growth factor receptor 2 (HER2), or an antigen-binding fragment thereof, and
(b) a modified Fc polypeptide dimer comprising a first Fc polypeptide that contains modifications that create a TfR-binding site.

2. The Fc polypeptide dimer-antibody variable region fusion protein of claim 1, wherein the antibody variable region forms part of a Fab domain.

3. The Fc polypeptide dimer-antibody variable region fusion protein of claim 1, wherein the antibody variable region binds to subdomain IV, II, or I of human HER2.

4. The Fc polypeptide dimer-antibody variable region fusion protein of claim 3, wherein the antibody variable region binds to subdomain IV of human HER2 and comprises one or more complementarity determining regions (CDRs) selected from the group consisting of:
(a) a heavy chain CDR1 having at least 90% sequence identity to the amino acid sequence of SEQ ID NO:69 or having up to two amino acid substitutions relative to the amino acid sequence of SEQ ID NO:69;
(b) a heavy chain CDR2 having at least 90% sequence identity to the amino acid sequence of SEQ ID NO:70 or having up to two amino acid substitutions relative to the amino acid sequence of SEQ ID NO:70;
(c) a heavy chain CDR3 having at least 90% sequence identity to the amino acid sequence of SEQ ID NO:71 or having up to two amino acid substitutions relative to the amino acid sequence of SEQ ID NO:71;
(d) a light chain CDR1 having at least 90% sequence identity to the amino acid sequence of SEQ ID NO:72 or having up to two amino acid substitutions relative to the amino acid sequence of SEQ ID NO:72;
(e) a light chain CDR2 having up to two amino acid substitutions relative to the amino acid sequence of SEQ ID NO:73; and
(f) a light chain CDR3 having up to two amino acid substitutions relative to the amino acid sequence of SEQ ID NO:74.

5. (canceled)

6. (canceled)

7. The Fc polypeptide dimer-antibody variable region fusion protein of claim 4, wherein the antibody variable region comprises two antibody heavy chain variable regions comprising the amino acid sequence of SEQ ID NO:59 and two light chain variable regions comprising the amino acid sequence of SEQ ID NO:60.

8. The Fc polypeptide dimer-antibody variable region fusion protein of claim 3, wherein the antibody variable region binds to subdomain II of human HER2 and comprises one or more CDRs selected from the group consisting of:
(a) a heavy chain CDR1 having at least 90% sequence identity to the amino acid sequence of SEQ ID NO:75 or having up to two amino acid substitutions relative to the amino acid sequence of SEQ ID NO:75;
(b) a heavy chain CDR2 having at least 90% sequence identity to the amino acid sequence of SEQ ID NO:76 or having up to two amino acid substitutions relative to the amino acid sequence of SEQ ID NO:76;
(c) a heavy chain CDR3 having at least 90% sequence identity to the amino acid sequence of SEQ ID NO:77 or having up to two amino acid substitutions relative to the amino acid sequence of SEQ ID NO:77;
(d) a light chain CDR1 having at least 90% sequence identity to the amino acid sequence of SEQ ID NO:78 or having up to two amino acid substitutions relative to the amino acid sequence of SEQ ID NO:78;
(e) a light chain CDR2 having up to two amino acid substitutions relative to the amino acid sequence of SEQ ID NO:79; and
(f) a light chain CDR3 having up to two amino acid substitutions relative to the amino acid sequence of SEQ ID NO:80.

9. (canceled)

10. (canceled)

11. The Fc polypeptide dimer-antibody variable region fusion protein of claim 8, wherein the antibody variable region comprises two antibody heavy chain variable regions comprising the amino acid sequence of SEQ ID NO:61 and two light chain variable regions comprising the amino acid sequence of SEQ ID NO:62.

12-15. (canceled)

16. The Fc polypeptide dimer-antibody variable region fusion protein of claim 1, wherein the TfR-binding site is within the CH3 domain, wherein the modified CH3 domain is derived from a human IgG1, IgG2, IgG3, or IgG4 CH3 domain, and wherein the Fc polypeptide dimer-antibody variable region fusion protein binds to the apical domain of TfR.

17. (canceled)

18. The Fc polypeptide dimer-antibody variable region fusion protein of claim 16, wherein the modified CH3 domain comprises one, two, three, four, five, six, seven, eight, nine, ten, or eleven substitutions in a set of amino acid positions comprising 380, 384, 386, 387, 388, 389, 390, 413, 415, 416, and 421, according to EU numbering.

19. The Fc polypeptide dimer-antibody variable region fusion protein of claim 16, wherein the modified CH3 domain comprises Glu, Leu, Ser, Val, Trp, Tyr, or Gln at position 380; Leu, Tyr, Phe, Trp, Met, Pro, or Val at position 384; Leu, Thr, His, Pro, Asn, Val, or Phe at position 386; Val, Pro, Ile, or an acidic amino acid at position 387; Trp at position 388; an aliphatic amino acid, Gly, Ser, Thr, or Asn at position 389; Gly, His, Gln, Leu, Lys, Val, Phe, Ser, Ala, Asp, Glu, Asn, Arg, or Thr at position 390; an acidic amino acid, Ala, Ser, Leu, Thr, Pro, Ile, or His at position 413; Glu, Ser, Asp, Gly, Thr, Pro, Gln, or Arg at position 415; Thr, Arg, Asn, or an acidic amino acid at position 416; and/or an aromatic amino acid, His, or Lys at position 421, according to EU numbering.

20. (canceled)

21. The Fc polypeptide dimer-antibody variable region fusion protein of claim 1, wherein the first Fc polypeptide includes amino acid modifications that reduce FcγR binding when bound to TfR.

22. The Fc polypeptide dimer-antibody variable region fusion protein of claim 21, wherein the amino acid modifications comprise Ala at position 234 and at position 235, according to EU numbering.

23. (canceled)

24. (canceled)

25. The Fc polypeptide dimer-antibody variable region fusion protein of claim 1, wherein the first Fc polypeptide further comprises a knob mutation T366W and a second Fc polypeptide that is present in the Fc polypeptide dimer comprises hole mutations T366S, L368A, and Y407V, according to EU numbering.

26. The Fc polypeptide dimer-antibody variable region fusion protein of claim 25, wherein the first Fc polypeptide comprises the amino acid sequence of SEQ ID NO: 124.

27. The Fc polypeptide dimer-antibody variable region fusion protein of claim 25, wherein the second Fc polypeptide comprises an amino acid sequence selected from SEQ ID NOS:67 and 68.

28. The Fc polypeptide dimer-antibody variable region fusion protein of claim 25 wherein,
the second Fc polypeptide does not contain a TfR-binding site.

29-31. (canceled)

32. The Fc polypeptide dimer-antibody variable region fusion protein of claim 28, wherein the Fc polypeptide dimer-antibody variable region fusion protein comprises a first heavy chain comprising a amino acid sequence selected from SEQ ID NOS:1, 9, 17, and 81.

33. The Fc polypeptide dimer-antibody variable region fusion protein of claim 28, wherein the first Fc polypeptide further comprises amino acid modifications L234A and L235A, according to EU numbering.

34. The Fc polypeptide dimer-antibody variable region fusion protein of claim 33, wherein the Fc polypeptide dimer-antibody variable region fusion protein comprises a first heavy chain comprising an amino acid sequence selected from SEQ ID NOS:2, 10, 18, and 82.

35. The Fc polypeptide dimer-antibody variable region fusion protein of claim 28, wherein the Fc polypeptide dimer-antibody variable region fusion protein comprises a second heavy chain comprising the amino acid sequence of SEQ ID NO:27 and two light chains comprising the amino acid sequence of SEQ ID NO:57.

36. (canceled)

37. The Fc polypeptide dimer-antibody variable region fusion protein of claim 28, wherein the Fc polypeptide dimer-antibody variable region fusion protein comprises a first heavy chain comprising an amino acid sequence selected from SEQ ID NOS:29, 37, 45, and 89.

38. The Fc polypeptide dimer-antibody variable region fusion protein of claim 28, wherein the first Fc polypeptide further comprises amino acid modifications L234A and L235A and comprises an amino acid sequence selected from SEQ ID NOS:30, 38, 46, and 90.

39. (canceled)

40. The Fc polypeptide dimer-antibody variable region fusion protein of claim 28, wherein the Fc polypeptide dimer-antibody variable region fusion protein comprises a second heavy chain comprising the amino acid sequence of SEQ ID NO:55 and two light chains comprising the amino acid sequence of SEQ ID NO:58.

41-103. (canceled)

104. The Fc polypeptide dimer-antibody variable region fusion protein of claim 28, wherein the modified Fc polypeptide dimer does not substantially deplete reticulocytes or an amount of reticulocytes depleted after administering the Fc polypeptide dimer-antibody variable region fusion protein is less than an amount of reticulocytes depleted after administering a control, and wherein the control is a corresponding TfR-binding polypeptide dimer-antibody variable region fusion protein with full effector function and/or contains no mutations that reduce FcγR binding.

105. (canceled)

106. (canceled)

107. An antibody heavy chain comprising:
(a) an anti-human HER2 antibody heavy chain variable region, or a fragment thereof, and
(b) a modified Fc polypeptide that contains modifications that create a TfR-binding site.

108. The antibody heavy chain of claim 107, wherein the modified Fc polypeptide includes one or more amino acid modifications that reduce FcγR binding when bound to TfR.

109. The antibody heavy chain of claim 107, wherein the antibody heavy chain variable region comprises one or more CDRs selected from the group consisting of:
(a) a heavy chain CDR1 having at least 90% sequence identity to the amino acid sequence of SEQ ID NO:69 or having up to two amino acid substitutions relative to the amino acid sequence of SEQ ID NO:69;
(b) a heavy chain CDR2 having at least 90% sequence identity to the amino acid sequence of SEQ ID NO:70 or having up to two amino acid substitutions relative to the amino acid sequence of SEQ ID NO:70; and
(c) a heavy chain CDR3 having at least 90% sequence identity to the amino acid sequence of SEQ ID NO:71 or having up to two amino acid substitutions relative to the amino acid sequence of SEQ ID NO:71.

110. (canceled)

111. The antibody heavy chain of claim 107, wherein the antibody heavy chain variable region comprises the amino acid sequence of SEQ ID NO:59.

112. The antibody heavy chain of claim 107, wherein the antibody variable region comprises one or more CDRs selected from the group consisting of:
(a) a heavy chain CDR1 having at least 90% sequence identity to the amino acid sequence of SEQ ID NO:75 or having up to two amino acid substitutions relative to the amino acid sequence of SEQ ID NO:75;
(b) a heavy chain CDR2 having at least 90% sequence identity to the amino acid sequence of SEQ ID NO:76 or having up to two amino acid substitutions relative to the amino acid sequence of SEQ ID NO:76; and
(c) a heavy chain CDR3 having at least 90% sequence identity to the amino acid sequence of SEQ ID NO:77 or having up to two amino acid substitutions relative to the amino acid sequence of SEQ ID NO:77.

113. (canceled)

114. The antibody heavy chain of claim 107, wherein the antibody heavy chain variable region comprises the amino acid sequence of SEQ ID NO:61.

115-117. (canceled)

118. The antibody heavy chain of claim 107, wherein the TfR-binding site comprises a modified CH3 domain and the modified CH3 domain is derived from a human IgG1, IgG2, IgG3, or IgG4 CH3 domain.

119. (canceled)

120. The antibody heavy chain of claim 118, wherein the modified CH3 domain comprises one, two, three, four, five, six, seven, eight, nine, ten, or eleven substitutions in a set of amino acid positions comprising 380, 384, 386, 387, 388, 389, 390, 413, 415, 416, and 421, according to EU numbering.

121. The antibody heavy chain of claim 118, wherein the modified CH3 domain comprises Glu, Leu, Ser, Val, Trp, Tyr, or Gln at position 380; Leu, Tyr, Phe, Trp, Met, Pro, or Val at position 384; Leu, Thr, His, Pro, Asn, Val, or Phe at position 386; Val, Pro, Ile, or an acidic amino acid at position 387; Trp at position 388; an aliphatic amino acid, Gly, Ser, Thr, or Asn at position 389; Gly, His, Gln, Leu, Lys, Val, Phe, Ser, Ala, Asp, Glu, Asn, Arg, or Thr at position 390; an acidic amino acid, Ala, Ser, Leu, Thr, Pro, Ile, or His at position 413; Glu, Ser, Asp, Gly, Thr, Pro, Gln, or Arg at position 415; Thr, Arg, Asn, or an acidic amino acid at position 416; and/or an aromatic amino acid, His, or Lys at position 421, according to EU numbering.

122. The antibody heavy chain of claim 108, wherein the amino acid modifications that reduce FcγR binding when bound to TfR comprise Ala at position 234 and at position 235, according to EU numbering.

123. (canceled)

124. (canceled)

125. The antibody heavy chain of claim 122, wherein the modified Fc polypeptide further comprises a knob mutation T366W, according to EU numbering.

126. The antibody heavy chain of claim 125, wherein the modified Fc polypeptide comprises the amino acid sequence of SEQ ID NO: 124.

127-130. (canceled)

131. The antibody heavy chain of claim 125, wherein the antibody heavy chain comprises an amino acid sequence selected from SEQ ID NOS:1, 9, 17, and 81 and SEQ ID NOS:29, 37, 45, and 89.

132-134. (canceled)

135. The antibody heavy chain of claim 122, wherein the antibody heavy chain comprises an amino acid sequence selected from SEQ ID NOS:2, 10, 18, and 82 and SEQ ID NOS:30, 38, 46, and 90.

136-148. (canceled)

149. A pharmaceutical composition comprising the Fc polypeptide dimer-antibody variable region fusion protein of claim 1 and a pharmaceutically acceptable carrier.

150. A method of transcytosis of an antibody variable region that is capable of binding human HER2, or an antigen-binding fragment thereof, across an endothelium, the method comprising contacting the endothelium with a composition comprising an Fc polypeptide dimer-antibody variable region fusion protein of claim 1.

151. The method of claim 150, wherein the endothelium is the BBB.

152. A method for treating a cancer in a subject, the method comprising administering to the subject a therapeutically effective amount of a composition comprising an Fc polypeptide dimer-antibody variable region fusion protein of claim 1.

153-164. (canceled)

The application's sequence listing, which the Patent Office published only in electronic form, follows.

SEQUENCE LISTING (314 sequences)

SEQ ID NO: 1 - protein, 450 aa, Artificial Sequence
  Description of Artificial Sequence: Synthetic polypeptide
EVQLVESGGGLVQPGGSLRLSCAASGFNIKDTYIHWVRQAPGKGLEWVARIYPTNGYTRYADSVKGRFTISADTSKNTAYLQMNSLRAEDTAVYYCSRWGGDGFYAMDYWGQGTLVTVSSASTKGPSVFPLAPSSKSTSGGTAALGCLVKDYFPEPVTVSWNSGALTSGVHTFPAVLQSSGLYSLSSVVTVPSSSLGTQTYICNVNHKPSNTKVDKKVEPKSCDKTHTCPPCPAPELLGGPSVFLFPPKPKDTLMISRTPEVTCVVVDVSHEDPEVKFNWYVDGVEVHNAKTKPREEQYNSTYRVVSVLTVLHQDWLNGKEYKCKVSNKALPAPIEKTISKAKGQPREPQVYTLPPSRDELTKNQVSLWCLVKGFYPSDIAVEWESFGTEWSNYKTTPPVLDSDGSFFLYSKLTVSKEEWQQGFVFSCSVMHEALHNHYTQKSLSLSPGK

SEQ ID NO: 2 - protein, 450 aa, Artificial Sequence
  Description of Artificial Sequence: Synthetic polypeptide
EVQLVESGGGLVQPGGSLRLSCAASGFNIKDTYIHWVRQAPGKGLEWVARIYPTNGYTRYADSVKGRFTISADTSKNTAYLQMNSLRAEDTAVYYCSRWGGDGFYAMDYWGQGTLVTVSSASTKGPSVFPLAPSSKSTSGGTAALGCLVKDYFPEPVTVSWNSGALTSGVHTFPAVLQSSGLYSLSSVVTVPSSSLGTQTYICNVNHKPSNTKVDKKVEPKSCDKTHTCPPCPAPEAAGGPSVFLFPPKPKDTLMISRTPEVTCVVVDVSHEDPEVKFNWYVDGVEVHNAKTKPREEQYNSTYRVVSVLTVLHQDWLNGKEYKCKVSNKALPAPIEKTISKAKGQPREPQVYTLPPSRDELTKNQVSLWCLVKGFYPSDIAVEWESFGTEWSNYKTTPPVLDSDGSFFLYSKLTVSKEEWQQGFVFSCSVMHEALHNHYTQKSLSLSPGK

SEQ ID NO: 3 - protein, 450 aa, Artificial Sequence
  Description of Artificial Sequence: Synthetic polypeptide
EVQLVESGGGLVQPGGSLRLSCAASGFNIKDTYIHWVRQAPGKGLEWVARIYPTNGYTRYADSVKGRFTISADTSKNTAYLQMNSLRAEDTAVYYCSRWGGDGFYAMDYWGQGTLVTVSSASTKGPSVFPLAPSSKSTSGGTAALGCLVKDYFPEPVTVSWNSGALTSGVHTFPAVLQSSGLYSLSSVVTVPSSSLGTQTYICNVNHKPSNTKVDKKVEPKSCDKTHTCPPCPAPELLGGPSVFLFPPKPKDTLMISRTPEVTCVVVDVSHEDPEVKFNWYVDGVEVHNAKTKPREEQYNSTYRVVSVLTVLHQDWLNGKEYKCKVSNKALPAPIEKTISKAKGQPREPQVYTLPPSRDELTKNQVSLWCLVKGFYPSDIAVEWESFGTEWSNYKTTPPVLDSDGSFFLYSKLTVSKEEWQQGFVFSCSVLHEALHSHYTQKSLSLSPGK

SEQ ID NO: 4 - protein, 450 aa, Artificial Sequence
  Description of Artificial Sequence: Synthetic polypeptide
EVQLVESGGGLVQPGGSLRLSCAASGFNIKDTYIHWVRQAPGKGLEWVARIYPTNGYTRYADSVKGRFTISADTSKNTAYLQMNSLRAEDTAVYYCSRWGGDGFYAMDYWGQGTLVTVSSASTKGPSVFPLAPSSKSTSGGTAALGCLVKDYFPEPVTVSWNSGALTSGVHTFPAVLQSSGLYSLSSVVTVPSSSLGTQTYICNVNHKPSNTKVDKKVEPKSCDKTHTCPPCPAPEAAGGPSVFLFPPKPKDTLMISRTPEVTCVVVDVSHEDPEVKFNWYVDGVEVHNAKTKPREEQYNSTYRVVSVLTVLHQDWLNGKEYKCKVSNKALPAPIEKTISKAKGQPREPQVYTLPPSRDELTKNQVSLWCLVKGFYPSDIAVEWESFGTEWSNYKTTPPVLDSDGSFFLYSKLTVSKEEWQQGFVFSCSVLHEALHSHYTQKSLSLSPGK

SEQ ID NO: 5 - protein, 450 aa, Artificial Sequence
  Description of Artificial Sequence: Synthetic polypeptide
EVQLVESGGGLVQPGGSLRLSCAASGFNIKDTYIHWVRQAPGKGLEWVARIYPTNGYTRYADSVKGRFTISADTSKNTAYLQMNSLRAEDTAVYYCSRWGGDGFYAMDYWGQGTLVTVSSASTKGPSVFPLAPSSKSTSGGTAALGCLVKDYFPEPVTVSWNSGALTSGVHTFPAVLQSSGLYSLSSVVTVPSSSLGTQTYICNVNHKPSNTKVDKKVEPKSCDKTHTCPPCPAPELLGGPSVFLFPPKPKDTLMISRTPEVTCVVVDVSHEDPEVKFNWYVDGVEVHNAKTKPREEQYNSTYRVVSVLTVLHQDWLNGKEYKCKVSNKALPAPIEKTISKAKGQPREPQVYTLPPSRDELTKNQVSLSCAVKGFYPSDIAVEWESFGTEWSNYKTTPPVLDSDGSFFLVSKLTVSKEEWQQGFVFSCSVMHEALHNHYTQKSLSLSPGK

SEQ ID NO: 6 - protein, 450 aa, Artificial Sequence
  Description of Artificial Sequence: Synthetic polypeptide
EVQLVESGGGLVQPGGSLRLSCAASGFNIKDTYIHWVRQAPGKGLEWVARIYPTNGYTRYADSVKGRFTISADTSKNTAYLQMNSLRAEDTAVYYCSRWGGDGFYAMDYWGQGTLVTVSSASTKGPSVFPLAPSSKSTSGGTAALGCLVKDYFPEPVTVSWNSGALTSGVHTFPAVLQSSGLYSLSSVVTVPSSSLGTQTYICNVNHKPSNTKVDKKVEPKSCDKTHTCPPCPAPEAAGGPSVFLFPPKPKDTLMISRTPEVTCVVVDVSHEDPEVKFNWYVDGVEVHNAKTKPREEQYNSTYRVVSVLTVLHQDWLNGKEYKCKVSNKALPAPIEKTISKAKGQPREPQVYTLPPSRDELTKNQVSLSCAVKGFYPSDIAVEWESFGTEWSNYKTTPPVLDSDGSFFLVSKLTVSKEEWQQGFVFSCSVMHEALHNHYTQKSLSLSPGK

SEQ ID NO: 7 - protein, 450 aa, Artificial Sequence
  Description of Artificial Sequence: Synthetic polypeptide
EVQLVESGGGLVQPGGSLRLSCAASGFNIKDTYIHWVRQAPGKGLEWVARIYPTNGYTRYADSVKGRFTISADTSKNTAYLQMNSLRAEDTAVYYCSRWGGDGFYAMDYWGQGTLVTVSSASTKGPSVFPLAPSSKSTSGGTAALGCLVKDYFPEPVTVSWNSGALTSGVHTFPAVLQSSGLYSLSSVVTVPSSSLGTQTYICNVNHKPSNTKVDKKVEPKSCDKTHTCPPCPAPELLGGPSVFLFPPKPKDTLMISRTPEVTCVVVDVSHEDPEVKFNWYVDGVEVHNAKTKPREEQYNSTYRVVSVLTVLHQDWLNGKEYKCKVSNKALPAPIEKTISKAKGQPREPQVYTLPPSRDELTKNQVSLSCAVKGFYPSDIAVEWESFGTEWSNYKTTPPVLDSDGSFFLVSKLTVSKEEWQQGFVFSCSVLHEALHSHYTQKSLSLSPGK

SEQ ID NO: 8 - protein, 450 aa, Artificial Sequence
  Description of Artificial Sequence: Synthetic polypeptide
EVQLVESGGGLVQPGGSLRLSCAASGFNIKDTYIHWVRQAPGKGLEWVARIYPTNGYTRYADSVKGRFTISADTSKNTAYLQMNSLRAEDTAVYYCSRWGGDGFYAMDYWGQGTLVTVSSASTKGPSVFPLAPSSKSTSGGTAALGCLVKDYFPEPVTVSWNSGALTSGVHTFPAVLQSSGLYSLSSVVTVPSSSLGTQTYICNVNHKPSNTKVDKKVEPKSCDKTHTCPPCPAPEAAGGPSVFLFPPKPKDTLMISRTPEVTCVVVDVSHEDPEVKFNWYVDGVEVHNAKTKPREEQYNSTYRVVSVLTVLHQDWLNGKEYKCKVSNKALPAPIEKTISKAKGQPREPQVYTLPPSRDELTKNQVSLSCAVKGFYPSDIAVEWESFGTEWSNYKTTPPVLDSDGSFFLVSKLTVSKEEWQQGFVFSCSVLHEALHSHYTQKSLSLSPGK

SEQ ID NO: 9 - protein, 450 aa, Artificial Sequence
  Description of Artificial Sequence: Synthetic polypeptide
EVQLVESGGGLVQPGGSLRLSCAASGFNIKDTYIHWVRQAPGKGLEWVARIYPTNGYTRYADSVKGRFTISADTSKNTAYLQMNSLRAEDTAVYYCSRWGGDGFYAMDYWGQGTLVTVSSASTKGPSVFPLAPSSKSTSGGTAALGCLVKDYFPEPVTVSWNSGALTSGVHTFPAVLQSSGLYSLSSVVTVPSSSLGTQTYICNVNHKPSNTKVDKKVEPKSCDKTHTCPPCPAPELLGGPSVFLFPPKPKDTLMISRTPEVTCVVVDVSHEDPEVKFNWYVDGVEVHNAKTKPREEQYNSTYRVVSVLTVLHQDWLNGKEYKCKVSNKALPAPIEKTISKAKGQPREPQVYTLPPSRDELTKNQVSLWCLVKGFYPSDIAVEWESYGTEWVNYKTTPPVLDSDGSFFLYSKLTVTKEEWQQGFVFSCSVMHEALHNHYTQKSLSLSPGK

SEQ ID NO: 10 - protein, 450 aa, Artificial Sequence
  Description of Artificial Sequence: Synthetic polypeptide
EVQLVESGGGLVQPGGSLRLSCAASGFNIKDTYIHWVRQAPGKGLEWVARIYPTNGYTRYADSVKGRFTISADTSKNTAYLQMNSLRAEDTAVYYCSRWGGDGFYAMDYWGQGTLVTVSSASTKGPSVFPLAPSSKSTSGGTAALGCLVKDYFPEPVTVSWNSGALTSGVHTFPAVLQSSGLYSLSSVVTVPSSSLGTQTYICNVNHKPSNTKVDKKVEPKSCDKTHTCPPCPAPEAAGGPSVFLFPPKPKDTLMISRTPEVTCVVVDVSHEDPEVKFNWYVDGVEVHNAKTKPREEQYNSTYRVVSVLTVLHQDWLNGKEYKCKVSNKALPAPIEKTISKAKGQPREPQVYTLPPSRDELTKNQVSLWCLVKGFYPSDIAVEWESYGTEWVNYKTTPPVLDSDGSFFLYSKLTVTKEEWQQGFVFSCSVMHEALHNHYTQKSLSLSPGK

SEQ ID NO: 11 - protein, 450 aa, Artificial Sequence
  Description of Artificial Sequence: Synthetic polypeptide
EVQLVESGGGLVQPGGSLRLSCAASGFNIKDTYIHWVRQAPGKGLEWVARIYPTNGYTRYADSVKGRFTISADTSKNTAYLQMNSLRAEDTAVYYCSRWGGDGFYAMDYWGQGTLVTVSSASTKGPSVFPLAPSSKSTSGGTAALGCLVKDYFPEPVTVSWNSGALTSGVHTFPAVLQSSGLYSLSSVVTVPSSSLGTQTYICNVNHKPSNTKVDKKVEPKSCDKTHTCPPCPAPELLGGPSVFLFPPKPKDTLMISRTPEVTCVVVDVSHEDPEVKFNWYVDGVEVHNAKTKPREEQYNSTYRVVSVLTVLHQDWLNGKEYKCKVSNKALPAPIEKTISKAKGQPREPQVYTLPPSRDELTKNQVSLWCLVKGFYPSDIAVEWESYGTEWVNYKTTPPVLDSDGSFFLYSKLTVTKEEWQQGFVFSCSVLHEALHSHYTQKSLSLSPGK

SEQ ID NO: 12 - protein, 450 aa, Artificial Sequence
  Description of Artificial Sequence: Synthetic polypeptide
EVQLVESGGGLVQPGGSLRLSCAASGFNIKDTYIHWVRQAPGKGLEWVARIYPTNGYTRYADSVKGRFTISADTSKNTAYLQMNSLRAEDTAVYYCSRWGGDGFYAMDYWGQGTLVTVSSASTKGPSVFPLAPSSKSTSGGTAALGCLVKDYFPEPVTVSWNSGALTSGVHTFPAVLQSSGLYSLSSVVTVPSSSLGTQTYICNVNHKPSNTKVDKKVEPKSCDKTHTCPPCPAPEAAGGPSVFLFPPKPKDTLMISRTPEVTCVVVDVSHEDPEVKFNWYVDGVEVHNAKTKPREEQYNSTYRVVSVLTVLHQDWLNGKEYKCKVSNKALPAPIEKTISKAKGQPREPQVYTLPPSRDELTKNQVSLWCLVKGFYPSDIAVEWESYGTEWVNYKTTPPVLDSDGSFFLYSKLTVTKEEWQQGFVFSCSVLHEALHSHYTQKSLSLSPGK

SEQ ID NO: 13 - protein, 450 aa, Artificial Sequence
  Description of Artificial Sequence: Synthetic polypeptide
EVQLVESGGGLVQPGGSLRLSCAASGFNIKDTYIHWVRQAPGKGLEWVARIYPTNGYTRYADSVKGRFTISADTSKNTAYLQMNSLRAEDTAVYYCSRWGGDGFYAMDYWGQGTLVTVSSASTKGPSVFPLAPSSKSTSGGTAALGCLVKDYFPEPVTVSWNSGALTSGVHTFPAVLQSSGLYSLSSVVTVPSSSLGTQTYICNVNHKPSNTKVDKKVEPKSCDKTHTCPPCPAPELLGGPSVFLFPPKPKDTLMISRTPEVTCVVVDVSHEDPEVKFNWYVDGVEVHNAKTKPREEQYNSTYRVVSVLTVLHQDWLNGKEYKCKVSNKALPAPIEKTISKAKGQPREPQVYTLPPSRDELTKNQVSLSCAVKGFYPSDIAVEWESYGTEWVNYKTTPPVLDSDGSFFLVSKLTVTKEEWQQGFVFSCSVMHEALHNHYTQKSLSLSPGK

SEQ ID NO: 14 - protein, 450 aa, Artificial Sequence
  Description of Artificial Sequence: Synthetic polypeptide
EVQLVESGGGLVQPGGSLRLSCAASGFNIKDTYIHWVRQAPGKGLEWVARIYPTNGYTRYADSVKGRFTISADTSKNTAYLQMNSLRAEDTAVYYCSRWGGDGFYAMDYWGQGTLVTVSSASTKGPSVFPLAPSSKSTSGGTAALGCLVKDYFPEPVTVSWNSGALTSGVHTFPAVLQSSGLYSLSSVVTVPSSSLGTQTYICNVNHKPSNTKVDKKVEPKSCDKTHTCPPCPAPEAAGGPSVFLFPPKPKDTLMISRTPEVTCVVVDVSHEDPEVKFNWYVDGVEVHNAKTKPREEQYNSTYRVVSVLTVLHQDWLNGKEYKCKVSNKALPAPIEKTISKAKGQPREPQVYTLPPSRDELTKNQVSLSCAVKGFYPSDIAVEWESYGTEWVNYKTTPPVLDSDGSFFLVSKLTVTKEEWQQGFVFSCSVMHEALHNHYTQKSLSLSPGK

SEQ ID NO: 15 - protein, 450 aa, Artificial Sequence
  Description of Artificial Sequence: Synthetic polypeptide
EVQLVESGGGLVQPGGSLRLSCAASGFNIKDTYIHWVRQAPGKGLEWVARIYPTNGYTRYADSVKGRFTISADTSKNTAYLQMNSLRAEDTAVYYCSRWGGDGFYAMDYWGQGTLVTVSSASTKGPSVFPLAPSSKSTSGGTAALGCLVKDYFPEPVTVSWNSGALTSGVHTFPAVLQSSGLYSLSSVVTVPSSSLGTQTYICNVNHKPSNTKVDKKVEPKSCDKTHTCPPCPAPELLGGPSVFLFPPKPKDTLMISRTPEVTCVVVDVSHEDPEVKFNWYVDGVEVHNAKTKPREEQYNSTYRVVSVLTVLHQDWLNGKEYKCKVSNKALPAPIEKTISKAKGQPREPQVYTLPPSRDELTKNQVSLSCAVKGFYPSDIAVEWESYGTEWVNYKTTPPVLDSDGSFFLVSKLTVTKEEWQQGFVFSCSVLHEALHSHYTQKSLSLSPGK

SEQ ID NO: 16 - protein, 450 aa, Artificial Sequence
  Description of Artificial Sequence: Synthetic polypeptide
EVQLVESGGGLVQPGGSLRLSCAASGFNIKDTYIHWVRQAPGKGLEWVARIYPTNGYTRYADSVKGRFTISADTSKNTAYLQMNSLRAEDTAVYYCSRWGGDGFYAMDYWGQGTLVTVSSASTKGPSVFPLAPSSKSTSGGTAALGCLVKDYFPEPVTVSWNSGALTSGVHTFPAVLQSSGLYSLSSVVTVPSSSLGTQTYICNVNHKPSNTKVDKKVEPKSCDKTHTCPPCPAPEAAGGPSVFLFPPKPKDTLMISRTPEVTCVVVDVSHEDPEVKFNWYVDGVEVHNAKTKPREEQYNSTYRVVSVLTVLHQDWLNGKEYKCKVSNKALPAPIEKTISKAKGQPREPQVYTLPPSRDELTKNQVSLSCAVKGFYPSDIAVEWESYGTEWVNYKTTPPVLDSDGSFFLVSKLTVTKEEWQQGFVFSCSVLHEALHSHYTQKSLSLSPGK

SEQ ID NO: 17 - protein, 450 aa, Artificial Sequence
  Description of Artificial Sequence: Synthetic polypeptide
EVQLVESGGGLVQPGGSLRLSCAASGFNIKDTYIHWVRQAPGKGLEWVARIYPTNGYTRYADSVKGRFTISADTSKNTAYLQMNSLRAEDTAVYYCSRWGGDGFYAMDYWGQGTLVTVSSASTKGPSVFPLAPSSKSTSGGTAALGCLVKDYFPEPVTVSWNSGALTSGVHTFPAVLQSSGLYSLSSVVTVPSSSLGTQTYICNVNHKPSNTKVDKKVEPKSCDKTHTCPPCPAPELLGGPSVFLFPPKPKDTLMISRTPEVTCVVVDVSHEDPEVKFNWYVDGVEVHNAKTKPREEQYNSTYRVVSVLTVLHQDWLNGKEYKCKVSNKALPAPIEKTISKAKGQPREPQVYTLPPSRDELTKNQVSLWCLVKGFYPSDIAVEWESYGTEWSNYKTTPPVLDSDGSFFLYSKLTVSKEEWQQGFVFSCSVMHEALHNHYTQKSLSLSPGK

SEQ ID NO: 18 - protein, 450 aa, Artificial Sequence
  Description of Artificial Sequence: Synthetic polypeptide
EVQLVESGGGLVQPGGSLRLSCAASGFNIKDTYIHWVRQAPGKGLEWVARIYPTNGYTRYADSVKGRFTISADTSKNTAYLQMNSLRAEDTAVYYCSRWGGDGFYAMDYWGQGTLVTVSSASTKGPSVFPLAPSSKSTSGGTAALGCLVKDYFPEPVTVSWNSGALTSGVHTFPAVLQSSGLYSLSSVVTVPSSSLGTQTYICNVNHKPSNTKVDKKVEPKSCDKTHTCPPCPAPEAAGGPSVFLFPPKPKDTLMISRTPEVTCVVVDVSHEDPEVKFNWYVDGVEVHNAKTKPREEQYNSTYRVVSVLTVLHQDWLNGKEYKCKVSNKALPAPIEKTISKAKGQPREPQVYTLPPSRDELTKNQVSLWCLVKGFYPSDIAVEWESYGTEWSNYKTTPPVLDSDGSFFLYSKLTVSKEEWQQGFVFSCSVMHEALHNHYTQKSLSLSPGK

SEQ ID NO: 19 - protein, 450 aa, Artificial Sequence
  Description of Artificial Sequence: Synthetic polypeptide
EVQLVESGGGLVQPGGSLRLSCAASGFNIKDTYIHWVRQAPGKGLEWVARIYPTNGYTRYADSVKGRFTISADTSKNTAYLQMNSLRAEDTAVYYCSRWGGDGFYAMDYWGQGTLVTVSSASTKGPSVFPLAPSSKSTSGGTAALGCLVKDYFPEPVTVSWNSGALTSGVHTFPAVLQSSGLYSLSSVVTVPSSSLGTQTYICNVNHKPSNTKVDKKVEPKSCDKTHTCPPCPAPELLGGPSVFLFPPKPKDTLMISRTPEVTCVVVDVSHEDPEVKFNWYVDGVEVHNAKTKPREEQYNSTYRVVSVLTVLHQDWLNGKEYKCKVSNKALPAPIEKTISKAKGQPREPQVYTLPPSRDELTKNQVSLWCLVKGFYPSDIAVEWESYGTEWSNYKTTPPVLDSDGSFFLYSKLTVSKEEWQQGFVFSCSVLHEALHSHYTQKSLSLSPGK

SEQ ID NO: 20 - protein, 450 aa, Artificial Sequence
  Description of Artificial Sequence: Synthetic polypeptide
EVQLVESGGGLVQPGGSLRLSCAASGFNIKDTYIHWVRQAPGKGLEWVARIYPTNGYTRYADSVKGRFTISADTSKNTAYLQMNSLRAEDTAVYYCSRWGGDGFYAMDYWGQGTLVTVSSASTKGPSVFPLAPSSKSTSGGTAALGCLVKDYFPEPVTVSWNSGALTSGVHTFPAVLQSSGLYSLSSVVTVPSSSLGTQTYICNVNHKPSNTKVDKKVEPKSCDKTHTCPPCPAPEAAGGPSVFLFPPKPKDTLMISRTPEVTCVVVDVSHEDPEVKFNWYVDGVEVHNAKTKPREEQYNSTYRVVSVLTVLHQDWLNGKEYKCKVSNKALPAPIEKTISKAKGQPREPQVYTLPPSRDELTKNQVSLWCLVKGFYPSDIAVEWESYGTEWSNYKTTPPVLDSDGSFFLYSKLTVSKEEWQQGFVFSCSVLHEALHSHYTQKSLSLSPGK

SEQ ID NO: 21 - protein, 450 aa, Artificial Sequence
  Description of Artificial Sequence: Synthetic polypeptide
EVQLVESGGGLVQPGGSLRLSCAASGFNIKDTYIHWVRQAPGKGLEWVARIYPTNGYTRYADSVKGRFTISADTSKNTAYLQMNSLRAEDTAVYYCSRWGGDGFYAMDYWGQGTLVTVSSASTKGPSVFPLAPSSKSTSGGTAALGCLVKDYFPEPVTVSWNSGALTSGVHTFPAVLQSSGLYSLSSVVTVPSSSLGTQTYICNVNHKPSNTKVDKKVEPKSCDKTHTCPPCPAPELLGGPSVFLFPPKPKDTLMISRTPEVTCVVVDVSHEDPEVKFNWYVDGVEVHNAKTKPREEQYNSTYRVVSVLTVLHQDWLNGKEYKCKVSNKALPAPIEKTISKAKGQPREPQVYTLPPSRDELTKNQVSLSCAVKGFYPSDIAVEWESYGTEWSNYKTTPPVLDSDGSFFLVSKLTVSKEEWQQGFVFSCSVMHEALHNHYTQKSLSLSPGK

SEQ ID NO: 22 - protein, 450 aa, Artificial Sequence
  Description of Artificial Sequence: Synthetic polypeptide
EVQLVESGGGLVQPGGSLRLSCAASGFNIKDTYIHWVRQAPGKGLEWVARIYPTNGYTRYADSVKGRFTISADTSKNTAYLQMNSLRAEDTAVYYCSRWGGDGFYAMDYWGQGTLVTVSSASTKGPSVFPLAPSSKSTSGGTAALGCLVKDYFPEPVTVSWNSGALTSGVHTFPAVLQSSGLYSLSSVVTVPSSSLGTQTYICNVNHKPSNTKVDKKVEPKSCDKTHTCPPCPAPEAAGGPSVFLFPPKPKDTLMISRTPEVTCVVVDVSHEDPEVKFNWYVDGVEVHNAKTKPREEQYNSTYRVVSVLTVLHQDWLNGKEYKCKVSNKALPAPIEKTISKAKGQPREPQVYTLPPSRDELTKNQVSLSCAVKGFYPSDIAVEWESYGTEWSNYKTTPPVLDSDGSFFLVSKLTVSKEEWQQGFVFSCSVMHEALHNHYTQKSLSLSPGK

SEQ ID NO: 23 - protein, 450 aa, Artificial Sequence
  Description of Artificial Sequence: Synthetic polypeptide
EVQLVESGGGLVQPGGSLRLSCAASGFNIKDTYIHWVRQAPGKGLEWVARIYPTNGYTRYADSVKGRFTISADTSKNTAYLQMNSLRAEDTAVYYCSRWGGDGFYAMDYWGQGTLVTVSSASTKGPSVFPLAPSSKSTSGGTAALGCLVKDYFPEPVTVSWNSGALTSGVHTFPAVLQSSGLYSLSSVVTVPSSSLGTQTYICNVNHKPSNTKVDKKVEPKSCDKTHTCPPCPAPELLGGPSVFLFPPKPKDTLMISRTPEVTCVVVDVSHEDPEVKFNWYVDGVEVHNAKTKPREEQYNSTYRVVSVLTVLHQDWLNGKEYKCKVSNKALPAPIEKTISKAKGQPREPQVYTLPPSRDELTKNQVSLSCAVKGFYPSDIAVEWESYGTEWSNYKTTPPVLDSDGSFFLVSKLTVSKEEWQQGFVFSCSVLHEALHSHYTQKSLSLSPGK

SEQ ID NO: 24 - protein, 450 aa, Artificial Sequence
  Description of Artificial Sequence: Synthetic polypeptide
EVQLVESGGGLVQPGGSLRLSCAASGFNIKDTYIHWVRQAPGKGLEWVARIYPTNGYTRYADSVKGRFTISADTSKNTAYLQMNSLRAEDTAVYYCSRWGGDGFYAMDYWGQGTLVTVSSASTKGPSVFPLAPSSKSTSGGTAALGCLVKDYFPEPVTVSWNSGALTSGVHTFPAVLQSSGLYSLSSVVTVPSSSLGTQTYICNVNHKPSNTKVDKKVEPKSCDKTHTCPPCPAPEAAGGPSVFLFPPKPKDTLMISRTPEVTCVVVDVSHEDPEVKFNWYVDGVEVHNAKTKPREEQYNSTYRVVSVLTVLHQDWLNGKEYKCKVSNKALPAPIEKTISKAKGQPREPQVYTLPPSRDELTKNQVSLSCAVKGFYPSDIAVEWESYGTEWSNYKTTPPVLDSDGSFFLVSKLTVSKEEWQQGFVFSCSVLHEALHSHYTQKSLSLSPGK

SEQ ID NO: 25 - protein, 450 aa, Artificial Sequence
  Description of Artificial Sequence: Synthetic polypeptide
EVQLVESGGGLVQPGGSLRLSCAASGFNIKDTYIHWVRQAPGKGLEWVARIYPTNGYTRYADSVKGRFTISADTSKNTAYLQMNSLRAEDTAVYYCSRWGGDGFYAMDYWGQGTLVTVSSASTKGPSVFPLAPSSKSTSGGTAALGCLVKDYFPEPVTVSWNSGALTSGVHTFPAVLQSSGLYSLSSVVTVPSSSLGTQTYICNVNHKPSNTKVDKKVEPKSCDKTHTCPPCPAPELLGGPSVFLFPPKPKDTLMISRTPEVTCVVVDVSHEDPEVKFNWYVDGVEVHNAKTKPREEQYNSTYRVVSVLTVLHQDWLNGKEYKCKVSNKALPAPIEKTISKAKGQPREPQVYTLPPSRDELTKNQVSLWCLVKGFYPSDIAVEWESNGQPENNYKTTPPVLDSDGSFFLYSKLTVDKSRWQQGNVFSCSVMHEALHNHYTQKSLSLSPGK

SEQ ID NO: 26 - protein, 450 aa, Artificial Sequence
  Description of Artificial Sequence: Synthetic polypeptide
EVQLVESGGGLVQPGGSLRLSCAASGFNIKDTYIHWVRQAPGKGLEWVARIYPTNGYTRYADSVKGRFTISADTSKNTAYLQMNSLRAEDTAVYYCSRWGGDGFYAMDYWGQGTLVTVSSASTKGPSVFPLAPSSKSTSGGTAALGCLVKDYFPEPVTVSWNSGALTSGVHTFPAVLQSSGLYSLSSVVTVPSSSLGTQTYICNVNHKPSNTKVDKKVEPKSCDKTHTCPPCPAPELLGGPSVFLFPPKPKDTLMISRTPEVTCVVVDVSHEDPEVKFNWYVDGVEVHNAKTKPREEQYNSTYRVVSVLTVLHQDWLNGKEYKCKVSNKALPAPIEKTISKAKGQPREPQVYTLPPSRDELTKNQVSLWCLVKGFYPSDIAVEWESNGQPENNYKTTPPVLDSDGSFFLYSKLTVDKSRWQQGNVFSCSVLHEALHSHYTQKSLSLSPGK

SEQ ID NO: 27 - protein, 450 aa, Artificial Sequence
  Description of Artificial Sequence: Synthetic polypeptide
EVQLVESGGGLVQPGGSLRLSCAASGFNIKDTYIHWVRQAPGKGLEWVARIYPTNGYTRYADSVKGRFTISADTSKNTAYLQMNSLRAEDTAVYYCSRWGGDGFYAMDYWGQGTLVTVSSASTKGPSVFPLAPSSKSTSGGTAALGCLVKDYFPEPVTVSWNSGALTSGVHTFPAVLQSSGLYSLSSVVTVPSSSLGTQTYICNVNHKPSNTKVDKKVEPKSCDKTHTCPPCPAPELLGGPSVFLFPPKPKDTLMISRTPEVTCVVVDVSHEDPEVKFNWYVDGVEVHNAKTKPREEQYNSTYRVVSVLTVLHQDWLNGKEYKCKVSNKALPAPIEKTISKAKGQPREPQVYTLPPSRDELTKNQVSLSCAVKGFYPSDIAVEWESNGQPENNYKTTPPVLDSDGSFFLVSKLTVDKSRWQQGNVFSCSVMHEALHNHYTQKSLSLSPGK

SEQ ID NO: 28 - protein, 450 aa, Artificial Sequence
  Description of Artificial Sequence: Synthetic polypeptide
EVQLVESGGGLVQPGGSLRLSCAASGFNIKDTYIHWVRQAPGKGLEWVARIYPTNGYTRYADSVKGRFTISADTSKNTAYLQMNSLRAEDTAVYYCSRWGGDGFYAMDYWGQGTLVTVSSASTKGPSVFPLAPSSKSTSGGTAALGCLVKDYFPEPVTVSWNSGALTSGVHTFPAVLQSSGLYSLSSVVTVPSSSLGTQTYICNVNHKPSNTKVDKKVEPKSCDKTHTCPPCPAPELLGGPSVFLFPPKPKDTLMISRTPEVTCVVVDVSHEDPEVKFNWYVDGVEVHNAKTKPREEQYNSTYRVVSVLTVLHQDWLNGKEYKCKVSNKALPAPIEKTISKAKGQPREPQVYTLPPSRDELTKNQVSLSCAVKGFYPSDIAVEWESNGQPENNYKTTPPVLDSDGSFFLVSKLTVDKSRWQQGNVFSCSVLHEALHSHYTQKSLSLSPGK

SEQ ID NO: 29 - protein, 449 aa, Artificial Sequence
  Description of Artificial Sequence: Synthetic polypeptide
EVQLVESGGGLVQPGGSLRLSCAASGFTFTDYTMDWVRQAPGKGLEWVADVNPNSGGSIYNQRFKGRFTLSVDRSKNTLYLQMNSLRAEDTAVYYCARNLGPSFYFDYWGQGTLVTVSSASTKGPSVFPLAPSSKSTSGGTAALGCLVKDYFPEPVTVSWNSGALTSGVHTFPAVLQSSGLYSLSSVVTVPSSSLGTQTYICNVNHKPSNTKVDKKVEPKSCDKTHTCPPCPAPELLGGPSVFLFPPKPKDTLMISRTPEVTCVVVDVSHEDPEVKFNWYVDGVEVHNAKTKPREEQYNSTYRVVSVLTVLHQDWLNGKEYKCKVSNKALPAPIEKTISKAKGQPREPQVYTLPPSRDELTKNQVSLWCLVKGFYPSDIAVEWESFGTEWSNYKTTPPVLDSDGSFFLYSKLTVSKEEWQQGFVFSCSVMHEALHNHYTQKSLSLSPGK

SEQ ID NO: 30 - protein, 449 aa, Artificial Sequence
  Description of Artificial Sequence: Synthetic polypeptide
EVQLVESGGGLVQPGGSLRLSCAASGFTFTDYTMDWVRQAPGKGLEWVADVNPNSGGSIYNQRFKGRFTLSVDRSKNTLYLQMNSLRAEDTAVYYCARNLGPSFYFDYWGQGTLVTVSSASTKGPSVFPLAPSSKSTSGGTAALGCLVKDYFPEPVTVSWNSGALTSGVHTFPAVLQSSGLYSLSSVVTVPSSSLGTQTYICNVNHKPSNTKVDKKVEPKSCDKTHTCPPCPAPEAAGGPSVFLFPPKPKDTLMISRTPEVTCVVVDVSHEDPEVKFNWYVDGVEVHNAKTKPREEQYNSTYRVVSVLTVLHQDWLNGKEYKCKVSNKALPAPIEKTISKAKGQPREPQVYTLPPSRDELTKNQVSLWCLVKGFYPSDIAVEWESFGTEWSNYKTTPPVLDSDGSFFLYSKLTVSKEEWQQGFVFSCSVMHEALHNHYTQKSLSLSPGK

SEQ ID NO: 31 - protein, 449 aa, Artificial Sequence
  Description of Artificial Sequence: Synthetic polypeptide
EVQLVESGGGLVQPGGSLRLSCAASGFTFTDYTMDWVRQAPGKGLEWVADVNPNSGGSIYNQRFKGRFTLSVDRSKNTLYLQMNSLRAEDTAVYYCARNLGPSFYFDYWGQGTLVTVSSASTKGPSVFPLAPSSKSTSGGTAALGCLVKDYFPEPVTVSWNSGALTSGVHTFPAVLQSSGLYSLSSVVTVPSSSLGTQTYICNVNHKPSNTKVDKKVEPKSCDKTHTCPPCPAPELLGGPSVFLFPPKPKDTLMISRTPEVTCVVVDVSHEDPEVKFNWYVDGVEVHNAKTKPREEQYNSTYRVVSVLTVLHQDWLNGKEYKCKVSNKALPAPIEKTISKAKGQPREPQVYTLPPSRDELTKNQVSLWCLVKGFYPSDIAVEWESFGTEWSNYKTTPPVLDSDGSFFLYSKLTVSKEEWQQGFVFSCSVLHEALHSHYTQKSLSLSPGK

SEQ ID NO: 32 - protein, 449 aa, Artificial Sequence
  Description of Artificial Sequence: Synthetic polypeptide
EVQLVESGGGLVQPGGSLRLSCAASGFTFTDYTMDWVRQAPGKGLEWVADVNPNSGGSIYNQRFKGRFTLSVDRSKNTLYLQMNSLRAEDTAVYYCARNLGPSFYFDYWGQGTLVTVSSASTKGPSVFPLAPSSKSTSGGTAALGCLVKDYFPEPVTVSWNSGALTSGVHTFPAVLQSSGLYSLSSVVTVPSSSLGTQTYICNVNHKPSNTKVDKKVEPKSCDKTHTCPPCPAPEAAGGPSVFLFPPKPKDTLMISRTPEVTCVVVDVSHEDPEVKFNWYVDGVEVHNAKTKPREEQYNSTYRVVSVLTVLHQDWLNGKEYKCKVSNKALPAPIEKTISKAKGQPREPQVYTLPPSRDELTKNQVSLWCLVKGFYPSDIAVEWESFGTEWSNYKTTPPVLDSDGSFFLYSKLTVSKEEWQQGFVFSCSVLHEALHSHYTQKSLSLSPGK

SEQ ID NO: 33 - protein, 449 aa, Artificial Sequence
  Description of Artificial Sequence: Synthetic polypeptide
EVQLVESGGGLVQPGGSLRLSCAASGFTFTDYTMDWVRQAPGKGLEWVADVNPNSGGSIYNQRFKGRFTLSVDRSKNTLYLQMNSLRAEDTAVYYCARNLGPSFYFDYWGQGTLVTVSSASTKGPSVFPLAPSSKSTSGGTAALGCLVKDYFPEPVTVSWNSGALTSGVHTFPAVLQSSGLYSLSSVVTVPSSSLGTQTYICNVNHKPSNTKVDKKVEPKSCDKTHTCPPCPAPELLGGPSVFLFPPKPKDTLMISRTPEVTCVVVDVSHEDPEVKFNWYVDGVEVHNAKTKPREEQYNSTYRVVSVLTVLHQDWLNGKEYKCKVSNKALPAPIEKTISKAKGQPREPQVYTLPPSRDELTKNQVSLSCAVKGFYPSDIAVEWESFGTEWSNYKTTPPVLDSDGSFFLVSKLTVSKEEWQQGFVFSCSVMHEALHNHYTQKSLSLSPGK

SEQ ID NO: 34 - protein, 449 aa, Artificial Sequence
  Description of Artificial Sequence: Synthetic polypeptide
EVQLVESGGGLVQPGGSLRLSCAASGFTFTDYTMDWVRQAPGKGLEWVADVNPNSGGSIYNQRFKGRFTLSVDRSKNTLYLQMNSLRAEDTAVYYCARNLGPSFYFDYWGQGTLVTVSSASTKGPSVFPLAPSSKSTSGGTAALGCLVKDYFPEPVTVSWNSGALTSGVHTFPAVLQSSGLYSLSSVVTVPSSSLGTQTYICNVNHKPSNTKVDKKVEPKSCDKTHTCPPCPAPEAAGGPSVFLFPPKPKDTLMISRTPEVTCVVVDVSHEDPEVKFNWYVDGVEVHNAKTKPREEQYNSTYRVVSVLTVLHQDWLNGKEYKCKVSNKALPAPIEKTISKAKGQPREPQVYTLPPSRDELTKNQVSLSCAVKGFYPSDIAVEWESFGTEWSNYKTTPPVLDSDGSFFLVSKLTVSKEEWQQGFVFSCSVMHEALHNHYTQKSLSLSPGK

SEQ ID NO: 35 - protein, 449 aa, Artificial Sequence
  Description of Artificial Sequence: Synthetic polypeptide
EVQLVESGGGLVQPGGSLRLSCAASGFTFTDYTMDWVRQAPGKGLEWVADVNPNSGGSIYNQRFKGRFTLSVDRSKNTLYLQMNSLRAEDTAVYYCARNLGPSFYFDYWGQGTLVTVSSASTKGPSVFPLAPSSKSTSGGTAALGCLVKDYFPEPVTVSWNSGALTSGVHTFPAVLQSSGLYSLSSVVTVPSSSLGTQTYICNVNHKPSNTKVDKKVEPKSCDKTHTCPPCPAPELLGGPSVFLFPPKPKDTLMISRTPEVTCVVVDVSHEDPEVKFNWYVDGVEVHNAKTKPREEQYNSTYRVVSVLTVLHQDWLNGKEYKCKVSNKALPAPIEKTISKAKGQPREPQVYTLPPSRDELTKNQVSLSCAVKGFYPSDIAVEWESFGTEWSNYKTTPPVLDSDGSFFLVSKLTVSKEEWQQGFVFSCSVLHEALHSHYTQKSLSLSPGK

SEQ ID NO: 36 - protein, 449 aa, Artificial Sequence
  Description of Artificial Sequence: Synthetic polypeptide
EVQLVESGGGLVQPGGSLRLSCAASGFTFTDYTMDWVRQAPGKGLEWVADVNPNSGGSIYNQRFKGRFTLSVDRSKNTLYLQMNSLRAEDTAVYYCARNLGPSFYFDYWGQGTLVTVSSASTKGPSVFPLAPSSKSTSGGTAALGCLVKDYFPEPVTVSWNSGALTSGVHTFPAVLQSSGLYSLSSVVTVPSSSLGTQTYICNVNHKPSNTKVDKKVEPKSCDKTHTCPPCPAPEAAGGPSVFLFPPKPKDTLMISRTPEVTCVVVDVSHEDPEVKFNWYVDGVEVHNAKTKPREEQYNSTYRVVSVLTVLHQDWLNGKEYKCKVSNKALPAPIEKTISKAKGQPREPQVYTLPPSRDELTKNQVSLSCAVKGFYPSDIAVEWESFGTEWSNYKTTPPVLDSDGSFFLVSKLTVSKEEWQQGFVFSCSVLHEALHSHYTQKSLSLSPGK

SEQ ID NO: 37 - protein, 449 aa, Artificial Sequence
  Description of Artificial Sequence: Synthetic polypeptide
EVQLVESGGGLVQPGGSLRLSCAASGFTFTDYTMDWVRQAPGKGLEWVADVNPNSGGSIYNQRFKGRFTLSVDRSKNTLYLQMNSLRAEDTAVYYCARNLGPSFYFDYWGQGTLVTVSSASTKGPSVFPLAPSSKSTSGGTAALGCLVKDYFPEPVTVSWNSGALTSGVHTFPAVLQSSGLYSLSSVVTVPSSSLGTQTYICNVNHKPSNTKVDKKVEPKSCDKTHTCPPCPAPELLGGPSVFLFPPKPKDTLMISRTPEVTCVVVDVSHEDPEVKFNWYVDGVEVHNAKTKPREEQYNSTYRVVSVLTVLHQDWLNGKEYKCKVSNKALPAPIEKTISKAKGQPREPQVYTLPPSRDELTKNQVSLWCLVKGFYPSDIAVEWESYGTEWVNYKTTPPVLDSDGSFFLYSKLTVTKEEWQQGFVFSCSVMHEALHNHYTQKSLSLSPGK

SEQ ID NO: 38 - protein, 449 aa, Artificial Sequence
  Description of Artificial Sequence: Synthetic polypeptide
EVQLVESGGGLVQPGGSLRLSCAASGFTFTDYTMDWVRQAPGKGLEWVADVNPNSGGSIYNQRFKGRFTLSVDRSKNTLYLQMNSLRAEDTAVYYCARNLGPSFYFDYWGQGTLVTVSSASTKGPSVFPLAPSSKSTSGGTAALGCLVKDYFPEPVTVSWNSGALTSGVHTFPAVLQSSGLYSLSSVVTVPSSSLGTQTYICNVNHKPSNTKVDKKVEPKSCDKTHTCPPCPAPEAAGGPSVFLFPPKPKDTLMISRTPEVTCVVVDVSHEDPEVKFNWYVDGVEVHNAKTKPREEQYNSTYRVVSVLTVLHQDWLNGKEYKCKVSNKALPAPIEKTISKAKGQPREPQVYTLPPSRDELTKNQVSLWCLVKGFYPSDIAVEWESYGTEWVNYKTTPPVLDSDGSFFLYSKLTVTKEEWQQGFVFSCSVMHEALHNHYTQKSLSLSPGK

SEQ ID NO: 39 - protein, 449 aa, Artificial Sequence
  Description of Artificial Sequence: Synthetic polypeptide
EVQLVESGGGLVQPGGSLRLSCAASGFTFTDYTMDWVRQAPGKGLEWVADVNPNSGGSIYNQRFKGRFTLSVDRSKNTLYLQMNSLRAEDTAVYYCARNLGPSFYFDYWGQGTLVTVSSASTKGPSVFPLAPSSKSTSGGTAALGCLVKDYFPEPVTVSWNSGALTSGVHTFPAVLQSSGLYSLSSVVTVPSSSLGTQTYICNVNHKPSNTKVDKKVEPKSCDKTHTCPPCPAPELLGGPSVFLFPPKPKDTLMISRTPEVTCVVVDVSHEDPEVKFNWYVDGVEVHNAKTKPREEQYNSTYRVVSVLTVLHQDWLNGKEYKCKVSNKALPAPIEKTISKAKGQPREPQVYTLPPSRDELTKNQVSLWCLVKGFYPSDIAVEWESYGTEWVNYKTTPPVLDSDGSFFLYSKLTVTKEEWQQGFVFSCSVLHEALHSHYTQKSLSLSPGK

SEQ ID NO: 40 - protein, 449 aa, Artificial Sequence
  Description of Artificial Sequence: Synthetic polypeptide
EVQLVESGGGLVQPGGSLRLSCAASGFTFTDYTMDWVRQAPGKGLEWVADVNPNSGGSIYNQRFKGRFTLSVDRSKNTLYLQMNSLRAEDTAVYYCARNLGPSFYFDYWGQGTLVTVSSASTKGPSVFPLAPSSKSTSGGTAALGCLVKDYFPEPVTVSWNSGALTSGVHTFPAVLQSSGLYSLSSVVTVPSSSLGTQTYICNVNHKPSNTKVDKKVEPKSCDKTHTCPPCPAPEAAGGPSVFLFPPKPKDTLMISRTPEVTCVVVDVSHEDPEVKFNWYVDGVEVHNAKTKPREEQYNSTYRVVSVLTVLHQDWLNGKEYKCKVSNKALPAPIEKTISKAKGQPREPQVYTLPPSRDELTKNQVSLWCLVKGFYPSDIAVEWESYGTEWVNYKTTPPVLDSDGSFFLYSKLTVTKEEWQQGFVFSCSVLHEALHSHYTQKSLSLSPGK

SEQ ID NO: 41 - protein, 449 aa, Artificial Sequence
  Description of Artificial Sequence: Synthetic polypeptide
EVQLVESGGGLVQPGGSLRLSCAASGFTFTDYTMDWVRQAPGKGLEWVADVNPNSGGSIYNQRFKGRFTLSVDRSKNTLYLQMNSLRAEDTAVYYCARNLGPSFYFDYWGQGTLVTVSSASTKGPSVFPLAPSSKSTSGGTAALGCLVKDYFPEPVTVSWNSGALTSGVHTFPAVLQSSGLYSLSSVVTVPSSSLGTQTYICNVNHKPSNTKVDKKVEPKSCDKTHTCPPCPAPELLGGPSVFLFPPKPKDTLMISRTPEVTCVVVDVSHEDPEVKFNWYVDGVEVHNAKTKPREEQYNSTYRVVSVLTVLHQDWLNGKEYKCKVSNKALPAPIEKTISKAKGQPREPQVYTLPPSRDELTKNQVSLSCAVKGFYPSDIAVEWESYGTEWVNYKTTPPVLDSDGSFFLVSKLTVTKEEWQQGFVFSCSVMHEALHNHYTQKSLSLSPGK

SEQ ID NO: 42 - protein, 449 aa, Artificial Sequence
  Description of Artificial Sequence: Synthetic polypeptide
EVQLVESGGGLVQPGGSLRLSCAASGFTFTDYTMDWVRQAPGKGLEWVADVNPNSGGSIYNQRFKGRFTLSVDRSKNTLYLQMNSLRAEDTAVYYCARNLGPSFYFDYWGQGTLVTVSSASTKGPSVFPLAPSSKSTSGGTAALGCLVKDYFPEPVTVSWNSGALTSGVHTFPAVLQSSGLYSLSSVVTVPSSSLGTQTYICNVNHKPSNTKVDKKVEPKSCDKTHTCPPCPAPEAAGGPSVFLFPPKPKDTLMISRTPEVTCVVVDVSHEDPEVKFNWYVDGVEVHNAKTKPREEQYNSTYRVVSVLTVLHQDWLNGKEYKCKVSNKALPAPIEKTISKAKGQPREPQVYTLPPSRDELTKNQVSLSCAVKGFYPSDIAVEWESYGTEWVNYKTTPPVLDSDGSFFLVSKLTVTKEEWQQGFVFSCSVMHEALHNHYTQKSLSLSPGK

SEQ ID NO: 43 - protein, 449 aa, Artificial Sequence
  Description of Artificial Sequence: Synthetic polypeptide
EVQLVESGGGLVQPGGSLRLSCAASGFTFTDYTMDWVRQAPGKGLEWVADVNPNSGGSIYNQRFKGRFTLSVDRSKNTLYLQMNSLRAEDTAVYYCARNLGPSFYFDYWGQGTLVTVSSASTKGPSVFPLAPSSKSTSGGTAALGCLVKDYFPEPVTVSWNSGALTSGVHTFPAVLQSSGLYSLSSVVTVPSSSLGTQTYICNVNHKPSNTKVDKKVEPKSCDKTHTCPPCPAPELLGGPSVFLFPPKPKDTLMISRTPEVTCVVVDVSHEDPEVKFNWYVDGVEVHNAKTKPREEQYNSTYRVVSVLTVLHQDWLNGKEYKCKVSNKALPAPIEKTISKAKGQPREPQVYTLPPSRDELTKNQVSLSCAVKGFYPSDIAVEWESYGTEWVNYKTTPPVLDSDGSFFLVSKLTVTKEEWQQGFVFSCSVLHEALHSHYTQKSLSLSPGK

SEQ ID NO: 44 - protein, 449 aa, Artificial Sequence
  Description of Artificial Sequence: Synthetic polypeptide
EVQLVESGGGLVQPGGSLRLSCAASGFTFTDYTMDWVRQAPGKGLEWVADVNPNSGGSIYNQRFKGRFTLSVDRSKNTLYLQMNSLRAEDTAVYYCARNLGPSFYFDYWGQGTLVTVSSASTKGPSVFPLAPSSKSTSGGTAALGCLVKDYFPEPVTVSWNSGALTSGVHTFPAVLQSSGLYSLSSVVTVPSSSLGTQTYICNVNHKPSNTKVDKKVEPKSCDKTHTCPPCPAPEAAGGPSVFLFPPKPKDTLMISRTPEVTCVVVDVSHEDPEVKFNWYVDGVEVHNAKTKPREEQYNSTYRVVSVLTVLHQDWLNGKEYKCKVSNKALPAPIEKTISKAKGQPREPQVYTLPPSRDELTKNQVSLSCAVKGFYPSDIAVEWESYGTEWVNYKTTPPVLDSDGSFFLVSKLTVTKEEWQQGFVFSCSVLHEALHSHYTQKSLSLSPGK

SEQ ID NO: 45 - protein, 449 aa, Artificial Sequence
  Description of Artificial Sequence: Synthetic polypeptide
EVQLVESGGGLVQPGGSLRLSCAASGFTFTDYTMDWVRQAPGKGLEWVADVNPNSGGSIYNQRFKGRFTLSVDRSKNTLYLQMNSLRAEDTAVYYCARNLGPSFYFDYWGQGTLVTVSSASTKGPSVFPLAPSSKSTSGGTAALGCLVKDYFPEPVTVSWNSGALTSGVHTFPAVLQSSGLYSLSSVVTVPSSSLGTQTYICNVNHKPSNTKVDKKVEPKSCDKTHTCPPCPAPELLGGPSVFLFPPKPKDTLMISRTPEVTCVVVDVSHEDPEVKFNWYVDGVEVHNAKTKPREEQYNSTYRVVSVLTVLHQDWLNGKEYKCKVSNKALPAPIEKTISKAKGQPREPQVYTLPPSRDELTKNQVSLWCLVKGFYPSDIAVEWESYGTEWSNYKTTPPVLDSDGSFFLYSKLTVSKEEWQQGFVFSCSVMHEALHNHYTQKSLSLSPGK

SEQ ID NO: 46 - protein, 449 aa, Artificial Sequence
  Description of Artificial Sequence: Synthetic polypeptide
EVQLVESGGGLVQPGGSLRLSCAASGFTFTDYTMDWVRQAPGKGLEWVADVNPNSGGSIYNQRFKGRFTLSVDRSKNTLYLQMNSLRAEDTAVYYCARNLGPSFYFDYWGQGTLVTVSSASTKGPSVFPLAPSSKSTSGGTAALGCLVKDYFPEPVTVSWNSGALTSGVHTFPAVLQSSGLYSLSSVVTVPSSSLGTQTYICNVNHKPSNTKVDKKVEPKSCDKTHTCPPCPAPEAAGGPSVFLFPPKPKDTLMISRTPEVTCVVVDVSHEDPEVKFNWYVDGVEVHNAKTKPREEQYNSTYRVVSVLTVLHQDWLNGKEYKCKVSNKALPAPIEKTISKAKGQPREPQVYTLPPSRDELTKNQVSLWCLVKGFYPSDIAVEWESYGTEWSNYKTTPPVLDSDGSFFLYSKLTVSKEEWQQGFVFSCSVMHEALHNHYTQKSLSLSPGK

SEQ ID NO: 47 - protein, 449 aa, Artificial Sequence
  Description of Artificial Sequence: Synthetic polypeptide
EVQLVESGGGLVQPGGSLRLSCAASGFTFTDYTMDWVRQAPGKGLEWVADVNPNSGGSIYNQRFKGRFTLSVDRSKNTLYLQMNSLRAEDTAVYYCARNLGPSFYFDYWGQGTLVTVSSASTKGPSVFPLAPSSKSTSGGTAALGCLVKDYFPEPVTVSWNSGALTSGVHTFPAVLQSSGLYSLSSVVTVPSSSLGTQTYICNVNHKPSNTKVDKKVEPKSCDKTHTCPPCPAPELLGGPSVFLFPPKPKDTLMISRTPEVTCVVVDVSHEDPEVKFNWYVDGVEVHNAKTKPREEQYNSTYRVVSVLTVLHQDWLNGKEYKCKVSNKALPAPIEKTISKAKGQPREPQVYTLPPSRDELTKNQVSLWCLVKGFYPSDIAVEWESYGTEWSNYKTTPPVLDSDGSFFLYSKLTVSKEEWQQGFVFSCSVLHEALHSHYTQKSLSLSPGK

SEQ ID NO: 48 - protein, 449 aa, Artificial Sequence
  Description of Artificial Sequence: Synthetic polypeptide
EVQLVESGGGLVQPGGSLRLSCAASGFTFTDYTMDWVRQAPGKGLEWVADVNPNSGGSIYNQRFKGRFTLSVDRSKNTLYLQMNSLRAEDTAVYYCARNLGPSFYFDYWGQGTLVTVSSASTKGPSVFPLAPSSKSTSGGTAALGCLVKDYFPEPVTVSWNSGALTSGVHTFPAVLQSSGLYSLSSVVTVPSSSLGTQTYICNVNHKPSNTKVDKKVEPKSCDKTHTCPPCPAPEAAGGPSVFLFPPKPKDTLMISRTPEVTCVVVDVSHEDPEVKFNWYVDGVEVHNAKTKPREEQYNSTYRVVSVLTVLHQDWLNGKEYKCKVSNKALPAPIEKTISKAKGQPREPQVYTLPPSRDELTKNQVSLWCLVKGFYPSDIAVEWESYGTEWSNYKTTPPVLDSDGSFFLYSKLTVSKEEWQQGFVFSCSVLHEALHSHYTQKSLSLSPGK

SEQ ID NO: 49 - protein, 449 aa, Artificial Sequence
  Description of Artificial Sequence: Synthetic polypeptide
EVQLVESGGGLVQPGGSLRLSCAASGFTFTDYTMDWVRQAPGKGLEWVADVNPNSGGSIYNQRFKGRFTLSVDRSKNTLYLQMNSLRAEDTAVYYCARNLGPSFYFDYWGQGTLVTVSSASTKGPSVFPLAPSSKSTSGGTAALGCLVKDYFPEPVTVSWNSGALTSGVHTFPAVLQSSGLYSLSSVVTVPSSSLGTQTYICNVNHKPSNTKVDKKVEPKSCDKTHTCPPCPAPELLGGPSVFLFPPKPKDTLMISRTPEVTCVVVDVSHEDPEVKFNWYVDGVEVHNAKTKPREEQYNSTYRVVSVLTVLHQDWLNGKEYKCKVSNKALPAPIEKTISKAKGQPREPQVYTLPPSRDELTKNQVSLSCAVKGFYPSDIAVEWESYGTEWSNYKTTPPVLDSDGSFFLVSKLTVSKEEWQQGFVFSCSVMHEALHNHYTQKSLSLSPGK

SEQ ID NO: 50 - protein, 449 aa, Artificial Sequence
  Description of Artificial Sequence: Synthetic polypeptide
EVQLVESGGGLVQPGGSLRLSCAASGFTFTDYTMDWVRQAPGKGLEWVADVNPNSGGSIYNQRFKGRFTLSVDRSKNTLYLQMNSLRAEDTAVYYCARNLGPSFYFDYWGQGTLVTVSSASTKGPSVFPLAPSSKSTSGGTAALGCLVKDYFPEPVTVSWNSGALTSGVHTFPAVLQSSGLYSLSSVVTVPSSSLGTQTYICNVNHKPSNTKVDKKVEPKSCDKTHTCPPCPAPEAAGGPSVFLFPPKPKDTLMISRTPEVTCVVVDVSHEDPEVKFNWYVDGVEVHNAKTKPREEQYNSTYRVVSVLTVLHQDWLNGKEYKCKVSNKALPAPIEKTISKAKGQPREPQVYTLPPSRDELTKNQVSLSCAVKGFYPSDIAVEWESYGTEWSNYKTTPPVLDSDGSFFLVSKLTVSKEEWQQGFVFSCSVMHEALHNHYTQKSLSLSPGK

SEQ ID NO: 51 - protein, 449 aa, Artificial Sequence
  Description of Artificial Sequence: Synthetic polypeptide
EVQLVESGGGLVQPGGSLRLSCAASGFTFTDYTMDWVRQAPGKGLEWVADVNPNSGGSIYNQRFKGRFTLSVDRSKNTLYLQMNSLRAEDTAVYYCARNLGPSFYFDYWGQGTLVTVSSASTKGPSVFPLAPSSKSTSGGTAALGCLVKDYFPEPVTVSWNSGALTSGVHTFPAVLQSSGLYSLSSVVTVPSSSLGTQTYICNVNHKPSNTKVDKKVEPKSCDKTHTCPPCPAPELLGGPSVFLFPPKPKDTLMISRTPEVTCVVVDVSHEDPEVKFNWYVDGVEVHNAKTKPREEQYNSTYRVVSVLTVLHQDWLNGKEYKCKVSNKALPAPIEKTISKAKGQPREPQVYTLPPSRDELTKNQVSLSCAVKGFYPSDIAVEWESYGTEWSNYKTTPPVLDSDGSFFLVSKLTVSKEEWQQGFVFSCSVLHEALHSHYTQKSLSLSPGK

SEQ ID NO: 52 - protein, 449 aa, Artificial Sequence
  Description of Artificial Sequence: Synthetic polypeptide
EVQLVESGGGLVQPGGSLRLSCAASGFTFTDYTMDWVRQAPGKGLEWVADVNPNSGGSIYNQRFKGRFTLSVDRSKNTLYLQMNSLRAEDTAVYYCARNLGPSFYFDYWGQGTLVTVSSASTKGPSVFPLAPSSKSTSGGTAALGCLVKDYFPEPVTVSWNSGALTSGVHTFPAVLQSSGLYSLSSVVTVPSSSLGTQTYICNVNHKPSNTKVDKKVEPKSCDKTHTCPPCPAPEAAGGPSVFLFPPKPKDTLMISRTPEVTCVVVDVSHEDPEVKFNWYVDGVEVHNAKTKPREEQYNSTYRVVSVLTVLHQDWLNGKEYKCKVSNKALPAPIEKTISKAKGQPREPQVYTLPPSRDELTKNQVSLSCAVKGFYPSDIAVEWESYGTEWSNYKTTPPVLDSDGSFFLVSKLTVSKEEWQQGFVFSCSVLHEALHSHYTQKSLSLSPGK

SEQ ID NO: 53 - protein, 449 aa, Artificial Sequence
  Description of Artificial Sequence: Synthetic polypeptide
EVQLVESGGGLVQPGGSLRLSCAASGFTFTDYTMDWVRQAPGKGLEWVADVNPNSGGSIYNQRFKGRFTLSVDRSKNTLYLQMNSLRAEDTAVYYCARNLGPSFYFDYWGQGTLVTVSSASTKGPSVFPLAPSSKSTSGGTAALGCLVKDYFPEPVTVSWNSGALTSGVHTFPAVLQSSGLYSLSSVVTVPSSSLGTQTYICNVNHKPSNTKVDKKVEPKSCDKTHTCPPCPAPELLGGPSVFLFPPKPKDTLMISRTPEVTCVVVDVSHEDPEVKFNWYVDGVEVHNAKTKPREEQYNSTYRVVSVLTVLHQDWLNGKEYKCKVSNKALPAPIEKTISKAKGQPREPQVYTLPPSRDELTKNQVSLWCLVKGFYPSDIAVEWESNGQPENNYKTTPPVLDSDGSFFLYSKLTVDKSRWQQGNVFSCSVMHEALHNHYTQKSLSLSPGK

SEQ ID NO: 54 - protein, 449 aa, Artificial Sequence
  Description of Artificial Sequence: Synthetic polypeptide
EVQLVESGGGLVQPGGSLRLSCAASGFTFTDYTMDWVRQAPGKGLEWVADVNPNSGGSIYNQRFKGRFTLSVDRSKNTLYLQMNSLRAEDTAVYYCARNLGPSFYFDYWGQGTLVTVSSASTKGPSVFPLAPSSKSTSGGTAALGCLVKDYFPEPVTVSWNSGALTSGVHTFPAVLQSSGLYSLSSVVTVPSSSLGTQTYICNVNHKPSNTKVDKKVEPKSCDKTHTCPPCPAPELLGGPSVFLFPPKPKDTLMISRTPEVTCVVVDVSHEDPEVKFNWYVDGVEVHNAKTKPREEQYNSTYRVVSVLTVLHQDWLNGKEYKCKVSNKALPAPIEKTISKAKGQPREPQVYTLPPSRDELTKNQVSLWCLVKGFYPSDIAVEWESNGQPENNYKTTPPVLDSDGSFFLYSKLTVDKSRWQQGNVFSCSVLHEALHSHYTQKSLSLSPGK

SEQ ID NO: 55 - protein, 449 aa, Artificial Sequence
  Description of Artificial Sequence: Synthetic polypeptide
EVQLVESGGGLVQPGGSLRLSCAASGFTFTDYTMDWVRQAPGKGLEWVADVNPNSGGSIYNQRFKGRFTLSVDRSKNTLYLQMNSLRAEDTAVYYCARNLGPSFYFDYWGQGTLVTVSSASTKGPSVFPLAPSSKSTSGGTAALGCLVKDYFPEPVTVSWNSGALTSGVHTFPAVLQSSGLYSLSSVVTVPSSSLGTQTYICNVNHKPSNTKVDKKVEPKSCDKTHTCPPCPAPELLGGPSVFLFPPKPKDTLMISRTPEVTCVVVDVSHEDPEVKFNWYVDGVEVHNAKTKPREEQYNSTYRVVSVLTVLHQDWLNGKEYKCKVSNKALPAPIEKTISKAKGQPREPQVYTLPPSRDELTKNQVSLSCAVKGFYPSDIAVEWESNGQPENNYKTTPPVLDSDGSFFLVSKLTVDKSRWQQGNVFSCSVMHEALHNHYTQKSLSLSPGK

SEQ ID NO: 56 - protein, 449 aa, Artificial Sequence
  Description of Artificial Sequence: Synthetic polypeptide
EVQLVESGGGLVQPGGSLRLSCAASGFTFTDYTMDWVRQAPGKGLEWVADVNPNSGGSIYNQRFKGRFTLSVDRSKNTLYLQMNSLRAEDTAVYYCARNLGPSFYFDYWGQGTLVTVSSASTKGPSVFPLAPSSKSTSGGTAALGCLVKDYFPEPVTVSWNSGALTSGVHTFPAVLQSSGLYSLSSVVTVPSSSLGTQTYICNVNHKPSNTKVDKKVEPKSCDKTHTCPPCPAPELLGGPSVFLFPPKPKDTLMISRTPEVTCVVVDVSHEDPEVKFNWYVDGVEVHNAKTKPREEQYNSTYRVVSVLTVLHQDWLNGKEYKCKVSNKALPAPIEKTISKAKGQPREPQVYTLPPSRDELTKNQVSLSCAVKGFYPSDIAVEWESNGQPENNYKTTPPVLDSDGSFFLVSKLTVDKSRWQQGNVFSCSVLHEALHSHYTQKSLSLSPGK

SEQ ID NO: 57 - protein, 214 aa, Artificial Sequence
  Description of Artificial Sequence: Synthetic polypeptide
DIQMTQSPSSLSASVGDRVTITCRASQDVNTAVAWYQQKPGKAPKLLIYSASFLYSGVPSRFSGSRSGTDFTLTISSLQPEDFATYYCQQHYTTPPTFGQGTKVEIKRTVAAPSVFIFPPSDEQLKSGTASVVCLLNNFYPREAKVQWKVDNALQSGNSQESVTEQDSKDSTYSLSSTLTLSKADYEKHKVYACEVTHQGLSSPVTKSFNRGEC

SEQ ID NO: 58 - protein, 214 aa, Artificial Sequence
  Description of Artificial Sequence: Synthetic polypeptide
DIQMTQSPSSLSASVGDRVTITCKASQDVSIGVAWYQQKPGKAPKLLIYSASYRYTGVPSRFSGSGSGTDFTLTISSLQPEDFATYYCQQYYIYPYTFGQGTKVEIKRTVAAPSVFIFPPSDEQLKSGTASVVCLLNNFYPREAKVQWKVDNALQSGNSQESVTEQDSKDSTYSLSSTLTLSKADYEKHKVYACEVTHQGLSSPVTKSFNRGEC

SEQ ID NO: 59 - protein, 120 aa, Artificial Sequence [sequence omitted]

SEQ ID NO: 60 - protein, 107 aa, Artificial Sequence [sequence omitted]

SEQ ID NO: 61 - protein, 119 aa, Artificial Sequence [sequence omitted]

SEQ ID NO: 62 - protein, 107 aa, Artificial Sequence [sequence omitted]

SEQ ID NO: 63 - protein, 217 aa, Artificial Sequence
  Description of Artificial Sequence: Synthetic polypeptide
  MOD_RES (4)..(5): Leu or Ala
  MOD_RES (154)..(154): Phe or Tyr
  MOD_RES (159)..(159): Ser or Val
  MOD_RES (183)..(183): Ser or Thr
  MOD_RES (198)..(198): Met or Leu
  MOD_RES (204)..(204): Asn or Ser
APEXXGGPSVFLFPPKPKDTLMISRTPEVTCVVVDVSHEDPEVKFNWYVDGVEVHNAKTKPREEQYNSTYRVVSVLTVLHQDWLNGKEYKCKVSNKALPAPIEKTISKAKGQPREPQVYTLPPSRDELTKNQVSLWCLVKGFYPSDIAVEWESXGTEWXNYKTTPPVLDSDGSFFLYSKLTVXKEEWQQGFVFSCSVXHEALHXHYTQKSLSLSPGK

SEQ ID NO: 64 - protein, 217 aa, Artificial Sequence
  Description of Artificial Sequence: Synthetic polypeptide
  MOD_RES (4)..(5): Leu or Ala
  MOD_RES (154)..(154): Phe or Tyr
  MOD_RES (159)..(159): Ser or Val
  MOD_RES (183)..(183): Ser or Thr
  MOD_RES (198)..(198): Met or Leu
  MOD_RES (204)..(204): Asn or Ser
APEXXGGPSVFLFPPKPKDTLMISRTPEVTCVVVDVSHEDPEVKFNWYVDGVEVHNAKTKPREEQYNSTYRVVSVLTVLHQDWLNGKEYKCKVSNKALPAPIEKTISKAKGQPREPQVYTLPPSRDELTKNQVSLSCAVKGFYPSDIAVEWESXGTEWXNYKTTPPVLDSDGSFFLVSKLTVXKEEWQQGFVFSCSVXHEALHXHYTQKSLSLSPGK

SEQ ID NO: 65 - protein, 217 aa, Artificial Sequence
  Description of Artificial Sequence: Synthetic polypeptide
APELLGGPSVFLFPPKPKDTLMISRTPEVTCVVVDVSHEDPEVKFNWYVDGVEVHNAKTKPREEQYNSTYRVVSVLTVLHQDWLNGKEYKCKVSNKALPAPIEKTISKAKGQPREPQVYTLPPSRDELTKNQVSLWCLVKGFYPSDIAVEWESNGQPENNYKTTPPVLDSDGSFFLYSKLTVDKSRWQQGNVFSCSVMHEALHNHYTQKSLSLSPGK

SEQ ID NO: 66 - protein, 217 aa, Artificial Sequence
  Description of Artificial Sequence: Synthetic polypeptide
APELLGGPSVFLFPPKPKDTLMISRTPEVTCVVVDVSHEDPEVKFNWYVDGVEVHNAKTKPREEQYNSTYRVVSVLTVLHQDWLNGKEYKCKVSNKALPAPIEKTISKAKGQPREPQVYTLPPSRDELTKNQVSLWCLVKGFYPSDIAVEWESNGQPENNYKTTPPVLDSDGSFFLYSKLTVDKSRWQQGNVFSCSVLHEALHSHYTQKSLSLSPGK

SEQ ID NO: 67 - protein, 217 aa, Artificial Sequence
  Description of Artificial Sequence: Synthetic polypeptide
APELLGGPSVFLFPPKPKDTLMISRTPEVTCVVVDVSHEDPEVKFNWYVDGVEVHNAKTKPREEQYNSTYRVVSVLTVLHQDWLNGKEYKCKVSNKALPAPIEKTISKAKGQPREPQVYTLPPSRDELTKNQVSLSCAVKGFYPSDIAVEWESNGQPENNYKTTPPVLDSDGSFFLVSKLTVDKSRWQQGNVFSCSVMHEALHNHYTQKSLSLSPGK

SEQ ID NO: 68 - protein, 217 aa, Artificial Sequence
  Description of Artificial Sequence: Synthetic polypeptide
APELLGGPSVFLFPPKPKDTLMISRTPEVTCVVVDVSHEDPEVKFNWYVDGVEVHNAKTKPREEQYNSTYRVVSVLTVLHQDWLNGKEYKCKVSNKALPAPIEKTISKAKGQPREPQVYTLPPSRDELTKNQVSLSCAVKGFYPSDIAVEWESNGQPENNYKTTPPVLDSDGSFFLVSKLTVDKSRWQQGNVFSCSVLHEALHSHYTQKSLSLSPGK

SEQ ID NO: 69 - protein, 10 aa, Artificial Sequence
  Description of Artificial Sequence: Synthetic peptide
GFNIKDTYIH

SEQ ID NO: 70 - protein, 17 aa, Artificial Sequence
  Description of Artificial Sequence: Synthetic peptide
RIYPTNGYTRYADSVKG

SEQ ID NO: 71 - protein, 13 aa, Artificial Sequence
  Description of Artificial Sequence: Synthetic peptide
SRWGGDGFYAMDY

SEQ ID NO: 72 - protein, 11 aa, Artificial Sequence
  Description of Artificial Sequence: Synthetic peptide
RASQDVNTAVA

SEQ ID NO: 73 - protein, 7 aa, Artificial Sequence
  Description of Artificial Sequence: Synthetic peptide
SASFLYS

SEQ ID NO: 74 - protein, 9 aa, Artificial Sequence
  Description of Artificial Sequence: Synthetic peptide
QQHYTTPPT

SEQ ID NO: 75 - protein, 10 aa, Artificial Sequence
  Description of Artificial Sequence: Synthetic peptide
GFTFTDYTMD

SEQ ID NO: 76 - protein, 17 aa, Artificial Sequence
  Description of Artificial Sequence: Synthetic peptide
DVNPNSGGSIYNQRFKG

SEQ ID NO: 77 - protein, 12 aa, Artificial Sequence
  Description of Artificial Sequence: Synthetic peptide
ARNLGPSFYFDY

SEQ ID NO: 78 - protein, 11 aa, Artificial Sequence
  Description of Artificial Sequence: Synthetic peptide
KASQDVSIGVA

SEQ ID NO: 79 - protein, 7 aa, Artificial Sequence
  Description of Artificial Sequence: Synthetic peptide
SASYRYT

SEQ ID NO: 80 - protein, 9 aa, Artificial Sequence
  Description of Artificial Sequence: Synthetic peptide
QQYYIYPYT

SEQ ID NO: 81 - protein, 450 aa, Artificial Sequence
  Description of Artificial Sequence: Synthetic polypeptide
EVQLVESGGGLVQPGGSLRLSCAASGFNIKDTYIHWVRQAPGKGLEWVARIYPTNGYTRYADSVKGRFTISADTSKNTAYLQMNSLRAEDTAVYYCSRWGGDGFYAMDYWGQGTLVTVSSASTKGPSVFPLAPSSKSTSGGTAALGCLVKDYFPEPVTVSWNSGALTSGVHTFPAVLQSSGLYSLSSVVTVPSSSLGTQTYICNVNHKPSNTKVDKKVEPKSCDKTHTCPPCPAPELLGGPSVFLFPPKPKDTLMISRTPEVTCVVVDVSHEDPEVKFNWYVDGVEVHNAKTKPREEQYNSTYRVVSVLTVLHQDWLNGKEYKCKVSNKALPAPIEKTISKAKGQPREPQVYTLPPSRDELTKNQVSLWCLVKGFYPSDIAVEWESYGTEWSNYKTTPPVLDSDGSFFLYSKLTVTKEEWQQGFVFSCSVMHEALHNHYTQKSLSLSPGK

SEQ ID NO: 82 - protein, 450 aa, Artificial Sequence
  Description of Artificial Sequence: Synthetic polypeptide
EVQLVESGGGLVQPGGSLRLSCAASGFNIKDTYIHWVRQAPGKGLEWVARIYPTNGYTRYADSVKGRFTISADTSKNTAYLQMNSLRAEDTAVYYCSRWGGDGFYAMDYWGQGTLVTVSSASTKGPSVFPLAPSSKSTSGGTAALGCLVKDYFPEPVTVSWNSGALTSGVHTFPAVLQSSGLYSLSSVVTVPSSSLGTQTYICNVNHKPSNTKVDKKVEPKSCDKTHTCPPCPAPEAAGGPSVFLFPPKPKDTLMISRTPEVTCVVVDVSHEDPEVKFNWYVDGVEVHNAKTKPREEQYNSTYRVVSVLTVLHQDWLNGKEYKCKVSNKALPAPIEKTISKAKGQPREPQVYTLPPSRDELTKNQVSLWCLVKGFYPSDIAVEWESYGTEWSNYKTTPPVLDSDGSFFLYSKLTVTKEEWQQGFVFSCSVMHEALHNHYTQKSLSLSPGK

SEQ ID NO: 83 - protein, 450 aa, Artificial Sequence
  Description of Artificial Sequence: Synthetic polypeptide
EVQLVESGGGLVQPGGSLRLSCAASGFNIKDTYIHWVRQAPGKGLEWVARIYPTNGYTRYADSVKGRFTISADTSKNTAYLQMNSLRAEDTAVYYCSRWGGDGFYAMDYWGQGTLVTVSSASTKGPSVFPLAPSSKSTSGGTAALGCLVKDYFPEPVTVSWNSGALTSGVHTFPAVLQSSGLYSLSSVVTVPSSSLGTQTYICNVNHKPSNTKVDKKVEPKSCDKTHTCPPCPAPELLGGPSVFLFPPKPKDTLMISRTPEVTCVVVDVSHEDPEVKFNWYVDGVEVHNAKTKPREEQYNSTYRVVSVLTVLHQDWLNGKEYKCKVSNKALPAPIEKTISKAKGQPREPQVYTLPPSRDELTKNQVSLWCLVKGFYPSDIAVEWESYGTEWSNYKTTPPVLDSDGSFFLYSKLTVTKEEWQQGFVFSCSVLHEALHSHYTQKSLSLSPGK

SEQ ID NO: 84 - protein, 450 aa, Artificial Sequence
  Description of Artificial Sequence: Synthetic polypeptide
EVQLVESGGGLVQPGGSLRLSCAASGFNIKDTYIHWVRQAPGKGLEWVARIYPTNGYTRYADSVKGRFTISADTSKNTAYLQMNSLRAEDTAVYYCSRWGGDGFYAMDYWGQGTLVTVSSASTKGPSVFPLAPSSKSTSGGTAALGCLVKDYFPEPVTVSWNSGALTSGVHTFPAVLQSSGLYSLSSVVTVPSSSLGTQTYICNVNHKPSNTKVDKKVEPKSCDKTHTCPPCPAPEAAGGPSVFLFPPKPKDTLMISRTPEVTCVVVDVSHEDPEVKFNWYVDGVEVHNAKTKPREEQYNSTYRVVSVLTVLHQDWLNGKEYKCKVSNKALPAPIEKTISKAKGQPREPQVYTLPPSRDELTKNQVSLWCLVKGFYPSDIAVEWESYGTEWSNYKTTPPVLDSDGSFFLYSKLTVTKEEWQQGFVFSCSVLHEALHSHYTQKSLSLSPGK

SEQ ID NO: 85 - protein, 450 aa, Artificial Sequence
  Description of Artificial Sequence: Synthetic polypeptide
EVQLVESGGGLVQPGGSLRLSCAASGFNIKDTYIHWVRQAPGKGLEWVARIYPTNGYTRYADSVKGRFTISADTSKNTAYLQMNSLRAEDTAVYYCSRWGGDGFYAMDYWGQGTLVTVSSASTKGPSVFPLAPSSKSTSGGTAALGCLVKDYFPEPVTVSWNSGALTSGVHTFPAVLQSSGLYSLSSVVTVPSSSLGTQTYICNVNHKPSNTKVDKKVEPKSCDKTHTCPPCPAPELLGGPSVFLFPPKPKDTLMISRTPEVTCVVVDVSHEDPEVKFNWYVDGVEVHNAKTKPREEQYNSTYRVVSVLTVLHQDWLNGKEYKCKVSNKALPAPIEKTISKAKGQPREPQVYTLPPSRDELTKNQVSLSCAVKGFYPSDIAVEWESYGTEWSNYKTTPPVLDSDGSFFLVSKLTVTKEEWQQGFVFSCSVMHEALHNHYTQKSLSLSPGK

SEQ ID NO: 86 - protein, 450 aa, Artificial Sequence
  Description of Artificial Sequence: Synthetic polypeptide
EVQLVESGGGLVQPGGSLRLSCAASGFNIKDTYIHWVRQAPGKGLEWVARIYPTNGYTRYADSVKGRFTISADTSKNTAYLQMNSLRAEDTAVYYCSRWGGDGFYAMDYWGQGTLVTVSSASTKGPSVFPLAPSSKSTSGGTAALGCLVKDYFPEPVTVSWNSGALTSGVHTFPAVLQSSGLYSLSSVVTVPSSSLGTQTYICNVNHKPSNTKVDKKVEPKSCDKTHTCPPCPAPEAAGGPSVFLFPPKPKDTLMISRTPEVTCVVVDVSHEDPEVKFNWYVDGVEVHNAKTKPREEQYNSTYRVVSVLTVLHQDWLNGKEYKCKVSNKALPAPIEKTISKAKGQPREPQVYTLPPSRDELTKNQVSLSCAVKGFYPSDIAVEWESYGTEWSNYKTTPPVLDSDGSFFLVSKLTVTKEEWQQGFVFSCSVMHEALHNHYTQKSLSLSPGK

SEQ ID NO: 87 - protein, 450 aa, Artificial Sequence
  Description of Artificial Sequence: Synthetic polypeptide
EVQLVESGGGLVQPGGSLRLSCAASGFNIKDTYIHWVRQAPGKGLEWVARIYPTNGYTRYADSVKGRFTISADTSKNTAYLQMNSLRAEDTAVYYCSRWGGDGFYAMDYWGQGTLVTVSSASTKGPSVFPLAPSSKSTSGGTAALGCLVKDYFPEPVTVSWNSGALTSGVHTFPAVLQSSGLYSLSSVVTVPSSSLGTQTYICNVNHKPSNTKVDKKVEPKSCDKTHTCPPCPAPELLGGPSVFLFPPKPKDTLMISRTPEVTCVVVDVSHEDPEVKFNWYVDGVEVHNAKTKPREEQYNSTYRVVSVLTVLHQDWLNGKEYKCKVSNKALPAPIEKTISKAKGQPREPQVYTLPPSRDELTKNQVSLSCAVKGFYPSDIAVEWESYGTEWSNYKTTPPVLDSDGSFFLVSKLTVTKEEWQQGFVFSCSVLHEALHSHYTQKSLSLSPGK

SEQ ID NO: 88 - protein, 450 aa, Artificial Sequence
  Description of Artificial Sequence: Synthetic polypeptide
EVQLVESGGGLVQPGGSLRLSCAASGFNIKDTYIHWVRQAPGKGLEWVARIYPTNGYTRYADSVKGRFTISADTSKNTAYLQMNSLRAEDTAVYYCSRWGGDGFYAMDYWGQGTLVTVSSASTKGPSVFPLAPSSKSTSGGTAALGCLVKDYFPEPVTVSWNSGALTSGVHTFPAVLQSSGLYSLSSVVTVPSSSLGTQTYICNVNHKPSNTKVDKKVEPKSCDKTHTCPPCPAPEAAGGPSVFLFPPKPKDTLMISRTPEVTCVVVDVSHEDPEVKFNWYVDGVEVHNAKTKPREEQYNSTYRVVSVLTVLHQDWLNGKEYKCKVSNKALPAPIEKTISKAKGQPREPQVYTLPPSRDELTKNQVSLSCAVKGFYPSDIAVEWESYGTEWSNYKTTPPVLDSDGSFFLVSKLTVTKEEWQQGFVFSCSVLHEALHSHYTQKSLSLSPGK

SEQ ID NO: 89 - protein, 449 aa, Artificial Sequence
  Description of Artificial Sequence: Synthetic polypeptide
EVQLVESGGGLVQPGGSLRLSCAASGFTFTDYTMDWVRQAPGKGLEWVADVNPNSGGSIYNQRFKGRFTLSVDRSKNTLYLQMNSLRAEDTAVYYCARNLGPSFYFDYWGQGTLVTVSSASTKGPSVFPLAPSSKSTSGGTAALGCLVKDYFPEPVTVSWNSGALTSGVHTFPAVLQSSGLYSLSSVVTVPSSSLGTQTYICNVNHKPSNTKVDKKVEPKSCDKTHTCPPCPAPELLGGPSVFLFPPKPKDTLMISRTPEVTCVVVDVSHEDPEVKFNWYVDGVEVHNAKTKPREEQYNSTYRVVSVLTVLHQDWLNGKEYKCKVSNKALPAPIEKTISKAKGQPREPQVYTLPPSRDELTKNQVSLWCLVKGFYPSDIAVEWESYGTEWSNYKTTPPVLDSDGSFFLYSKLTVTKEEWQQGFVFSCSVMHEALHNHYTQKSLSLSPGK

SEQ ID NO: 90 - protein, 449 aa, Artificial Sequence
  Description of Artificial Sequence: Synthetic polypeptide
EVQLVESGGGLVQPGGSLRLSCAASGFTFTDYTMDWVRQAPGKGLEWVADVNPNSGGSIYNQRFKGRFTLSVDRSKNTLYLQMNSLRAEDTAVYYCARNLGPSFYFDYWGQGTLVTVSSASTKGPSVFPLAPSSKSTSGGTAALGCLVKDYFPEPVTVSWNSGALTSGVHTFPAVLQSSGLYSLSSVVTVPSSSLGTQTYICNVNHKPSNTKVDKKVEPKSCDKTHTCPPCPAPEAAGGPSVFLFPPKPKDTLMISRTPEVTCVVVDVSHEDPEVKFNWYVDGVEVHNAKTKPREEQYNSTYRVVSVLTVLHQDWLNGKEYKCKVSNKALPAPIEKTISKAKGQPREPQVYTLPPSRDELTKNQVSLWCLVKGFYPSDIAVEWESYGTEWSNYKTTPPVLDSDGSFFLYSKLTVTKEEWQQGFVFSCSVMHEALHNHYTQKSLSLSPGK

SEQ ID NO: 91 - protein, 449 aa, Artificial Sequence
  Description of Artificial Sequence: Synthetic polypeptide
EVQLVESGGGLVQPGGSLRLSCAASGFTFTDYTMDWVRQAPGKGLEWVADVNPNSGGSIYNQRFKGRFTLSVDRSKNTLYLQMNSLRAEDTAVYYCARNLGPSFYFDYWGQGTLVTVSSASTKGPSVFPLAPSSKSTSGGTAALGCLVKDYFPEPVTVSWNSGALTSGVHTFPAVLQSSGLYSLSSVVTVPSSSLGTQTYICNVNHKPSNTKVDKKVEPKSCDKTHTCPPCPAPELLGGPSVFLFPPKPKDTLMISRTPEVTCVVVDVSHEDPEVKFNWYVDGVEVHNAKTKPREEQYNSTYRVVSVLTVLHQDWLNGKEYKCKVSNKALPAPIEKTISKAKGQPREPQVYTLPPSRDELTKNQVSLWCLVKGFYPSDIAVEWESYGTEWSNYKTTPPVLDSDGSFFLYSKLTVTKEEWQQGFVFSCSVLHEALHSHYTQKSLSLSPGK

SEQ ID NO: 92 - protein, 449 aa, Artificial Sequence
  Description of Artificial Sequence: Synthetic polypeptide
EVQLVESGGGLVQPGGSLRLSCAASGFTFTDYTMDWVRQAPGKGLEWVADVNPNSGGSIYNQRFKGRFTLSVDRSKNTLYLQMNSLRAEDTAVYYCARNLGPSFYFDYWGQGTLVTVSSASTKGPSVFPLAPSSKSTSGGTAALGCLVKDYFPEPVTVSWNSGALTSGVHTFPAVLQSSGLYSLSSVVTVPSSSLGTQTYICNVNHKPSNTKVDKKVEPKSCDKTHTCPPCPAPEAAGGPSVFLFPPKPKDTLMISRTPEVTCVVVDVSHEDPEVKFNWYVDGVEVHNAKTKPREEQYNSTYRVVSVLTVLHQDWLNGKEYKCKVSNKALPAPIEKTISKAKGQPREPQVYTLPPSRDELTKNQVSLWCLVKGFYPSDIAVEWESYGTEWSNYKTTPPVLDSDGSFFLYSKLTVTKEEWQQGFVFSCSVLHEALHSHYTQKSLSLSPGK

SEQ ID NO: 93 - protein, 449 aa, Artificial Sequence
  Description of Artificial Sequence: Synthetic polypeptide
EVQLVESGGGLVQPGGSLRLSCAASGFTFTDYTMDWVRQAPGKGLEWVADVNPNSGGSIYNQRFKGRFTLSVDRSKNTLYLQMNSLRAEDTAVYYCARNLGPSFYFDYWGQGTLVTVSSASTKGPSVFPLAPSSKSTSGGTAALGCLVKDYFPEPVTVSWNSGALTSGVHTFPAVLQSSGLYSLSSVVTVPSSSLGTQTYICNVNHKPSNTKVDKKVEPKSCDKTHTCPPCPAPELLGGPSVFLFPPKPKDTLMISRTPEVTCVVVDVSHEDPEVKFNWYVDGVEVHNAKTKPREEQYNSTYRVVSVLTVLHQDWLNGKEYKCKVSNKALPAPIEKTISKAKGQPREPQVYTLPPSRDELTKNQVSLSCAVKGFYPSDIAVEWESYGTEWSNYKTTPPVLDSDGSFFLVSKLTVTKEEWQQGFVFSCSVMHEALHNHYTQKSLSLSPGK

SEQ ID NO: 94 - protein, 449 aa, Artificial Sequence
  Description of Artificial Sequence: Synthetic polypeptide
EVQLVESGGGLVQPGGSLRLSCAASGFTFTDYTMDWVRQAPGKGLEWVADVNPNSGGSIYNQRFKGRFTLSVDRSKNTLYLQMNSLRAEDTAVYYCARNLGPSFYFDYWGQGTLVTVSSASTKGPSVFPLAPSSKSTSGGTAALGCLVKDYFPEPVTVSWNSGALTSGVHTFPAVLQSSGLYSLSSVVTVPSSSLGTQTYICNVNHKPSNTKVDKKVEPKSCDKTHTCPPCPAPEAAGGPSVFLFPPKPKDTLMISRTPEVTCVVVDVSHEDPEVKFNWYVDGVEVHNAKTKPREEQYNSTYRVVSVLTVLHQDWLNGKEYKCKVSNKALPAPIEKTISKAKGQPREPQVYTLPPSRDELTKNQVSLSCAVKGFYPSDIAVEWESYGTEWSNYKTTPPVLDSDGSFFLVSKLTVTKEEWQQGFVFSCSVMHEALHNHYTQKSLSLSPGK

SEQ ID NO: 95 - protein, 449 aa, Artificial Sequence
  Description of Artificial Sequence: Synthetic polypeptide
EVQLVESGGGLVQPGGSLRLSCAASGFTFTDYTMDWVRQAPGKGLEWVADVNPNSGGSIYNQRFKGRFTLSVDRSKNTLYLQMNSLRAEDTAVYYCARNLGPSFYFDYWGQGTLVTVSSASTKGPSVFPLAPSSKSTSGGTAALGCLVKDYFPEPVTVSWNSGALTSGVHTFPAVLQSSGLYSLSSVVTVPSSSLGTQTYICNVNHKPSNTKVDKKVEPKSCDKTHTCPPCPAPELLGGPSVFLFPPKPKDTLMISRTPEVTCVVVDVSHEDPEVKFNWYVDGVEVHNAKTKPREEQYNSTYRVVSVLTVLHQDWLNGKEYKCKVSNKALPAPIEKTISKAKGQPREPQVYTLPPSRDELTKNQVSLSCAVKGFYPSDIAVEWESYGTEWSNYKTTPPVLDSDGSFFLVSKLTVTKEEWQQGFVFSCSVLHEALHSHYTQKSLSLSPGK

SEQ ID NO: 96 - protein, 449 aa, Artificial Sequence
  Description of Artificial Sequence: Synthetic polypeptide
EVQLVESGGGLVQPGGSLRLSCAASGFTFTDYTMDWVRQAPGKGLEWVADVNPNSGGSIYNQRFKGRFTLSVDRSKNTLYLQMNSLRAEDTAVYYCARNLGPSFYFDYWGQGTLVTVSSASTKGPSVFPLAPSSKSTSGGTAALGCLVKDYFPEPVTVSWNSGALTSGVHTFPAVLQSSGLYSLSSVVTVPSSSLGTQTYICNVNHKPSNTKVDKKVEPKSCDKTHTCPPCPAPEAAGGPSVFLFPPKPKDTLMISRTPEVTCVVVDVSHEDPEVKFNWYVDGVEVHNAKTKPREEQYNSTYRVVSVLTVLHQDWLNGKEYKCKVSNKALPAPIEKTISKAKGQPREPQVYTLPPSRDELTKNQVSLSCAVKGFYPSDIAVEWESYGTEWSNYKTTPPVLDSDGSFFLVSKLTVTKEEWQQGFVFSCSVLHEALHSHYTQKSLSLSPGK

SEQ ID NO: 97 - protein, 450 aa, Artificial Sequence
  Description of Artificial Sequence: Synthetic polypeptide
EVQLVESGGGLVQPGGSLRLSCAASGFNIKDTYIHWVRQAPGKGLEWVARIYPTNGYTRYADSVKGRFTISADTSKNTAYLQMNSLRAEDTAVYYCSRWGGDGFYAMDYWGQGTLVTVSSASTKGPSVFPLAPSSKSTSGGTAALGCLVKDYFPEPVTVSWNSGALTSGVHTFPAVLQSSGLYSLSSVVTVPSSSLGTQTYICNVNHKPSNTKVDKKVEPKSCDKTHTCPPCPAPELLGGPSVFLFPPKPKDTLMISRTPEVTCVVVDVSHEDPEVKFNWYVDGVEVHNAKTKPREEQYNSTYRVVSVLTVLHQDWLNGKEYKCKVSNKALPAPIEKTISKAKGQPREPQVYTLPPSRDELTKNQVSLTCLVKGFYPSDIAVEWESNGQPENNYKTTPPVLDSDGSFFLYSKLTVDKSRWQQGNVFSCSVMHEALHNHYTQKSLSLSPGK

SEQ ID NO: 98 - protein, 449 aa, Artificial Sequence
  Description of Artificial Sequence: Synthetic polypeptide
EVQLVESGGGLVQPGGSLRLSCAASGFTFTDYTMDWVRQAPGKGLEWVADVNPNSGGSIYNQRFKGRFTLSVDRSKNTLYLQMNSLRAEDTAVYYCARNLGPSFYFDYWGQGTLVTVSSASTKGPSVFPLAPSSKSTSGGTAALGCLVKDYFPEPVTVSWNSGALTSGVHTFPAVLQSSGLYSLSSVVTVPSSSLGTQTYICNVNHKPSNTKVDKKVEPKSCDKTHTCPPCPAPELLGGPSVFLFPPKPKDTLMISRTPEVTCVVVDVSHEDPEVKFNWYVDGVEVHNAKTKPREEQYNSTYRVVSVLTVLHQDWLNGKEYKCKVSNKALPAPIEKTISKAKGQPREPQVYTLPPSRDELTKNQVSLTCLVKGFYPSDIAVEWESNGQPENNYKTTPPVLDSDGSFFLYSKLTVDKSRWQQGNVFSCSVMHEALHNHYTQKSLSLSPGK

SEQ ID NO: 99 - protein, 217 aa, Homo sapiens
APELLGGPSVFLFPPKPKDTLMISRTPEVTCVVVDVSHEDPEVKFNWYVDGVEVHNAKTKPREEQYNSTYRVVSVLTVLHQDWLNGKEYKCKVSNKALPAPIEKTISKAKGQPREPQVYTLPPSRDELTKNQVSLTCLVKGFYPSDIAVEWESNGQPENNYKTTPPVLDSDGSFFLYSKLTVDKSRWQQGNVFSCSVMHEALHNHYTQKSLSLSPGK

SEQ ID NO: 100 - protein, 110 aa, Homo sapiens
APELLGGPSVFLFPPKPKDTLMISRTPEVTCVVVDVSHEDPEVKFNWYVDGVEVHNAKTKPREEQYNSTYRVVSVLTVLHQDWLNGKEYKCKVSNKALPAPIEKTISKAK

SEQ ID NO: 101 - protein, 107 aa, Homo sapiens
GQPREPQVYTLPPSRDELTKNQVSLTCLVKGFYPSDIAVEWESNGQPENNYKTTPPVLDSDGSFFLYSKLTVDKSRWQQGNVFSCSVMHEALHNHYTQKSLSLSPGK

SEQ ID NO: 102 - protein, 760 aa, Homo sapiens
MMDQARSAFSNLFGGEPLSYTRFSLARQVDGDNSHVEMKLAVDEEENADNNTKANVTKPKRCSGSICYGTIAVIVFFLIGFMIGYLGYCKGVEPKTECERLAGTESPVREEPGEDFPAARRLYWDDLKRKLSEKLDSTDFTGTIKLLNENSYVPREAGSQKDENLALYVENQFREFKLSKVWRDQHFVKIQVKDSAQNSVIIVDKNGRLVYLVENPGGYVAYSKAATVTGKLVHANFGTKKDFEDLYTPVNGSIVIVRAGKITFAEKVANAESLNAIGVLIYMDQTKFPIVNAELSFFGHAHLGTGDPYTPGFPSFNHTQFPPSRSSGLPNIPVQTISRAAAEKLFGNMEGDCPSDWKTDSTCRMVTSESKNVKLTVSNVLKEIKILNIFGVIKGFVEPDHYVVVGAQRDAWGPGAAKSGVGTALLLKLAQMFSDMVLKDGFQPSRSIIFASWSAGDFGSVGATEWLEGYLSSLHLKAFTYINLDKAVLGTSNFKVSASPLLYTLIEKTMQNVKHPVTGQFLYQDSNWASKVEKLTLDNAAFPFLAYSGIPAVSFCFCEDTDYPYLGTTMDTYKELIERIPELNKVARAAAEVAGQFVIKLTHDVELNLDYERYNSQLLSFVRDLNQYRADIKEMGLSLQWLYSARGDFFRATSRLTTDFGNAEKTDRFVMKKLNDRVMRVEYHFLSPYVSPKESPFRHVFWGSGSHTLPALLENLKLRKQNNGAFNETLFRNQLALATWTIQGAANALSGDVWDIDNEF

SEQ ID NO: 103 - protein, 181 aa, Homo sapiens
NSVIIVDKNGRLVYLVENPGGYVAYSKAATVTGKLVHANFGTKKDFEDLYTPVNGSIVIVRAGKITFAEKVANAESLNAIGVLIYMDQTKFPIVNAELSFFGHAHLGTGDPYTPGFPSFNHTQFPPSRSSGLPNIPVQTISRAAAEKLFGNMEGDCPSDWKTDSTCRMVTSESKNVKLTVS

SEQ ID NO: 104 - protein, 15 aa, Homo sapiens
EPKSCDKTHTCPPCP

SEQ ID NO: 105 - protein, 217 aa, Artificial Sequence
  Description of Artificial Sequence: Synthetic polypeptide
APELLGGPSVFLFPPKPKDTLMISRTPEVTCVVVDVSHEDPEVKFNWYVDGVEVHNAKTKPREEQYNSTYRVVSVLTVLHQDWLNGKEYKCKVSNKALPAPIEKTISKAKGQPREPQVYTLPPSRDELTKNQVSLWCLVKGFYPSDIAVEWESYGTEWVNYKTTPPVLDSDGSFFLYSKLTVTKEEWQQGFVFSCSVMHEALHNHYTQKSLSLSPGK

SEQ ID NO: 106 - protein, 217 aa, Artificial Sequence
  Description of Artificial Sequence: Synthetic polypeptide
APEAAGGPSVFLFPPKPKDTLMISRTPEVTCVVVDVSHEDPEVKFNWYVDGVEVHNAKTKPREEQYNSTYRVVSVLTVLHQDWLNGKEYKCKVSNKALPAPIEKTISKAKGQPREPQVYTLPPSRDELTKNQVSLWCLVKGFYPSDIAVEWESYGTEWVNYKTTPPVLDSDGSFFLYSKLTVTKEEWQQGFVFSCSVMHEALHNHYTQKSLSLSPGK

SEQ ID NO: 107 - protein, 217 aa, Artificial Sequence
  Description of Artificial Sequence: Synthetic polypeptide
APEAAGGPSVFLFPPKPKDTLMISRTPEVTCVVVDVSHEDPEVKFNWYVDGVEVHNAKTKPREEQYNSTYRVVSVLTVLHQDWLNGKEYKCKVSNKALGAPIEKTISKAKGQPREPQVYTLPPSRDELTKNQVSLWCLVKGFYPSDIAVEWESYGTEWVNYKTTPPVLDSDGSFFLYSKLTVTKEEWQQGFVFSCSVMHEALHNHYTQKSLSLSPGK

SEQ ID NO: 108 - protein, 217 aa, Artificial Sequence
  Description of Artificial Sequence: Synthetic polypeptide
APELLGGPSVFLFPPKPKDTLYITREPEVTCVVVDVSHEDPEVKFNWYVDGVEVHNAKTKPREEQYNSTYRVVSVLTVLHQDWLNGKEYKCKVSNKALPAPIEKTISKAKGQPREPQVYTLPPSRDELTKNQVSLWCLVKGFYPSDIAVEWESYGTEWVNYKTTPPVLDSDGSFFLYSKLTVTKEEWQQGFVFSCSVMHEALHNHYTQKSLSLSPGK

SEQ ID NO: 109 - protein, 217 aa, Artificial Sequence
  Description of Artificial Sequence: Synthetic polypeptide
APELLGGPSVFLFPPKPKDTLMISRTPEVTCVVVDVSHEDPEVKFNWYVDGVEVHNAKTKPREEQYNSTYRVVSVLTVLHQDWLNGKEYKCKVSNKALPAPIEKTISKAKGQPREPQVYTLPPSRDELTKNQVSLWCLVKGFYPSDIAVEWESYGTEWVNYKTTPPVLDSDGSFFLYSKLTVTKEEWQQGFVFSCSVLHEALHSHYTQKSLSLSPGK

SEQ ID NO: 110 - protein, 217 aa, Artificial Sequence
  Description of Artificial Sequence: Synthetic polypeptide
APEAAGGPSVFLFPPKPKDTLYITREPEVTCVVVDVSHEDPEVKFNWYVDGVEVHNAKTKPREEQYNSTYRVVSVLTVLHQDWLNGKEYKCKVSNKALPAPIEKTISKAKGQPREPQVYTLPPSRDELTKNQVSLWCLVKGFYPSDIAVEWESYGTEWVNYKTTPPVLDSDGSFFLYSKLTVTKEEWQQGFVFSCSVMHEALHNHYTQKSLSLSPGK

SEQ ID NO: 111 - protein, 217 aa, Artificial Sequence
  Description of Artificial Sequence: Synthetic polypeptide
APEAAGGPSVFLFPPKPKDTLYITREPEVTCVVVDVSHEDPEVKFNWYVDGVEVHNAKTKPREEQYNSTYRVVSVLTVLHQDWLNGKEYKCKVSNKALGAPIEKTISKAKGQPREPQVYTLPPSRDELTKNQVSLWCLVKGFYPSDIAVEWESYGTEWVNYKTTPPVLDSDGSFFLYSKLTVTKEEWQQGFVFSCSVMHEALHNHYTQKSLSLSPGK

SEQ ID NO: 112 - protein, 217 aa, Artificial Sequence
  Description of Artificial Sequence: Synthetic polypeptide
APEAAGGPSVFLFPPKPKDTLMISRTPEVTCVVVDVSHEDPEVKFNWYVDGVEVHNAKTKPREEQYNSTYRVVSVLTVLHQDWLNGKEYKCKVSNKALPAPIEKTISKAKGQPREPQVYTLPPSRDELTKNQVSLWCLVKGFYPSDIAVEWESYGTEWVNYKTTPPVLDSDGSFFLYSKLTVTKEEWQQGFVFSCSVLHEALHSHYTQKSLSLSPGK

SEQ ID NO: 113 - protein, 217 aa, Artificial Sequence
  Description of Artificial Sequence: Synthetic polypeptide
APEAAGGPSVFLFPPKPKDTLMISRTPEVTCVVVDVSHEDPEVKFNWYVDGVEVHNAKTKPREEQYNSTYRVVSVLTVLHQDWLNGKEYKCKVSNKALGAPIEKTISKAKGQPREPQVYTLPPSRDELTKNQVSLWCLVKGFYPSDIAVEWESYGTEWVNYKTTPPVLDSDGSFFLYSKLTVTKEEWQQGFVFSCSVLHEALHSHYTQKSLSLSPGK

SEQ ID NO: 114 - protein, 217 aa, Artificial Sequence
  Description of Artificial Sequence: Synthetic polypeptide
APELLGGPSVFLFPPKPKDTLMISRTPEVTCVVVDVSHEDPEVKFNWYVDGVEVHNAKTKPREEQYNSTYRVVSVLTVLHQDWLNGKEYKCKVSNKALPAPIEKTISKAKGQPREPQVYTLPPSRDELTKNQVSLSCAVKGFYPSDIAVEWESYGTEWVNYKTTPPVLDSDGSFFLVSKLTVTKEEWQQGFVFSCSVMHEALHNHYTQKSLSLSPGK

SEQ ID NO: 115 - protein, 217 aa, Artificial Sequence
  Description of Artificial Sequence: Synthetic polypeptide
APEAAGGPSVFLFPPKPKDTLMISRTPEVTCVVVDVSHEDPEVKFNWYVDGVEVHNAKTKPREEQYNSTYRVVSVLTVLHQDWLNGKEYKCKVSNKALPAPIEKTISKAKGQPREPQVYTLPPSRDELTKNQVSLSCAVKGFYPSDIAVEWESYGTEWVNYKTTPPVLDSDGSFFLVSKLTVTKEEWQQGFVFSCSVMHEALHNHYTQKSLSLSPGK

SEQ ID NO: 116 - protein, 217 aa, Artificial Sequence
  Description of Artificial Sequence: Synthetic polypeptide
APEAAGGPSVFLFPPKPKDTLMISRTPEVTCVVVDVSHEDPEVKFNWYVDGVEVHNAKTKPREEQYNSTYRVVSVLTVLHQDWLNGKEYKCKVSNKALGAPIEKTISKAKGQPREPQVYTLPPSRDELTKNQVSLSCAVKGFYPSDIAVEWESYGTEWVNYKTTPPVLDSDGSFFLVSKLTVTKEEWQQGFVFSCSVMHEALHNHYTQKSLSLSPGK

SEQ ID NO: 117 - protein, 217 aa, Artificial Sequence
  Description of Artificial Sequence: Synthetic polypeptide
APELLGGPSVFLFPPKPKDTLYITREPEVTCVVVDVSHEDPEVKFNWYVDGVEVHNAKTKPREEQYNSTYRVVSVLTVLHQDWLNGKEYKCKVSNKALPAPIEKTISKAKGQPREPQVYTLPPSRDELTKNQVSLSCAVKGFYPSDIAVEWESYGTEWVNYKTTPPVLDSDGSFFLVSKLTVTKEEWQQGFVFSCSVMHEALHNHYTQKSLSLSPGK

SEQ ID NO: 118 - protein, 217 aa, Artificial Sequence
  Description of Artificial Sequence: Synthetic polypeptide
APELLGGPSVFLFPPKPKDTLMISRTPEVTCVVVDVSHEDPEVKFNWYVDGVEVHNAKTKPREEQYNSTYRVVSVLTVLHQDWLNGKEYKCKVSNKALPAPIEKTISKAKGQPREPQVYTLPPSRDELTKNQVSLSCAVKGFYPSDIAVEWESYGTEWVNYKTTPPVLDSDGSFFLVSKLTVTKEEWQQGFVFSCSVLHEALHSHYTQKSLSLSPGK

SEQ ID NO: 119 - protein, 217 aa, Artificial Sequence
  Description of Artificial Sequence: Synthetic polypeptide
APEAAGGPSVFLFPPKPKDTLYITREPEVTCVVVDVSHEDPEVKFNWYVDGVEVHNAKTKPREEQYNSTYRVVSVLTVLHQDWLNGKEYKCKVSNKALPAPIEKTISKAKGQPREPQVYTLPPSRDELTKNQVSLSCAVKGFYPSDIAVEWESYGTEWVNYKTTPPVLDSDGSFFLVSKLTVTKEEWQQGFVFSCSVMHEALHNHYTQKSLSLSPGK

SEQ ID NO: 120 - protein, 217 aa, Artificial Sequence
  Description of Artificial Sequence: Synthetic polypeptide
APEAAGGPSVFLFPPKPKDTLYITREPEVTCVVVDVSHEDPEVKFNWYVDGVEVHNAKTKPREEQYNSTYRVVSVLTVLHQDWLNGKEYKCKVSNKALGAPIEKTISKAKGQPREPQVYTLPPSRDELTKNQVSLSCAVKGFYPSDIAVEWESYGTEWVNYKTTPPVLDSDGSFFLVSKLTVTKEEWQQGFVFSCSVMHEALHNHYTQKSLSLSPGK

SEQ ID NO: 121 - protein, 217 aa, Artificial Sequence
  Description of Artificial Sequence: Synthetic polypeptide
APEAAGGPSVFLFPPKPKDTLMISRTPEVTCVVVDVSHEDPEVKFNWYVDGVEVHNAKTKPREEQYNSTYRVVSVLTVLHQDWLNGKEYKCKVSNKALPAPIEKTISKAKGQPREPQVYTLPPSRDELTKNQVSLSCAVKGFYPSDIAVEWESYGTEWVNYKTTPPVLDSDGSFFLVSKLTVTKEEWQQGFVFSCSVLHEALHSHYTQKSLSLSPGK

SEQ ID NO: 122 - protein, 217 aa, Artificial Sequence
  Description of Artificial Sequence: Synthetic polypeptide
APEAAGGPSVFLFPPKPKDTLMISRTPEVTCVVVDVSHEDPEVKFNWYVDGVEVHNAKTKPREEQYNSTYRVVSVLTVLHQDWLNGKEYKCKVSNKALGAPIEKTISKAKGQPREPQVYTLPPSRDELTKNQVSLSCAVKGFYPSDIAVEWESYGTEWVNYKTTPPVLDSDGSFFLVSKLTVTKEEWQQGFVFSCSVLHEALHSHYTQKSLSLSPGK

SEQ ID NO: 123 - protein, 217 aa, Artificial Sequence
  Description of Artificial Sequence: Synthetic polypeptide
APELLGGPSVFLFPPKPKDTLMISRTPEVTCVVVDVSHEDPEVKFNWYVDGVEVHNAKTKPREEQYNSTYRVVSVLTVLHQDWLNGKEYKCKVSNKALPAPIEKTISKAKGQPREPQVYTLPPSRDELTKNQVSLWCLVKGFYPSDIAVEWESYGTEWSNYKTTPPVLDSDGSFFLYSKLTVSKEEWQQGFVFSCSVMHEALHNHYTQKSLSLSPGK

SEQ ID NO: 124 - protein, 217 aa, Artificial Sequence
  Description of Artificial Sequence: Synthetic polypeptide
APEAAGGPSVFLFPPKPKDTLMISRTPEVTCVVVDVSHEDPEVKFNWYVDGVEVHNAKTKPREEQYNSTYRVVSVLTVLHQDWLNGKEYKCKVSNKALPAPIEKTISKAKGQPREPQVYTLPPSRDELTKNQVSLWCLVKGFYPSDIAVEWESYGTEWSNYKTTPPVLDSDGSFFLYSKLTVSKEEWQQGFVFSCSVMHEALHNHYTQKSLSLSPGK

SEQ ID NO: 125 - protein, 217 aa, Artificial Sequence
  Description of Artificial Sequence: Synthetic polypeptide
APEAAGGPSVFLFPPKPKDTLMISRTPEVTCVVVDVSHEDPEVKFNWYVDGVEVHNAKTKPREEQYNSTYRVVSVLTVLHQDWLNGKEYKCKVSNKALGAPIEKTISKAKGQPREPQVYTLPPSRDELTKNQVSLWCLVKGFYPSDIAVEWESYGTEWSNYKTTPPVLDSDGSFFLYSKLTVSKEEWQQGFVFSCSVMHEALHNHYTQKSLSLSPGK

SEQ ID NO: 126 - protein, 217 aa, Artificial Sequence
  Description of Artificial Sequence: Synthetic polypeptide
APELLGGPSVFLFPPKPKDTLYITREPEVTCVVVDVSHEDPEVKFNWYVDGVEVHNAKTKPREEQYNSTYRVVSVLTVLHQDWLNGKEYKCKVSNKALPAPIEKTISKAKGQPREPQVYTLPPSRDELTKNQVSLWCLVKGFYPSDIAVEWESYGTEWSNYKTTPPVLDSDGSFFLYSKLTVSKEEWQQGFVFSCSVMHEALHNHYTQKSLSLSPGK

SEQ ID NO: 127 - protein, 217 aa, Artificial Sequence
  Description of Artificial Sequence: Synthetic polypeptide
APELLGGPSVFLFPPKPKDTLMISRTPEVTCVVVDVSHEDPEVKFNWYVDGVEVHNAKTKPREEQYNSTYRVVSVLTVLHQDWLNGKEYKCKVSNKALPAPIEKTISKAKGQPREPQVYTLPPSRDELTKNQVSLWCLVKGFYPSDIAVEWESYGTEWSNYKTTPPVLDSDGSFFLYSKLTVSKEEWQQGFVFSCSVLHEALHSHYTQKSLSLSPGK

SEQ ID NO: 128 - protein, 217 aa, Artificial Sequence
  Description of Artificial Sequence: Synthetic polypeptide
APEAAGGPSVFLFPPKPKDTLYITREPEVTCVVVDVSHEDPEVKFNWYVDGVEVHNAKTKPREEQYNSTYRVVSVLTVLHQDWLNGKEYKCKVSNKALPAPIEKTISKAKGQPREPQVYTLPPSRDELTKNQVSLWCLVKGFYPSDIAVEWESYGTEWSNYKTTPPVLDSDGSFFLYSKLTVSKEEWQQGFVFSCSVMHEALHNHYTQKSLSLSPGK

SEQ ID NO: 129 - protein, 217 aa, Artificial Sequence
  Description of Artificial Sequence: Synthetic polypeptide
APEAAGGPSVFLFPPKPKDTLYITREPEVTCVVVDVSHEDPEVKFNWYVDGVEVHNAKTKPREEQYNSTYRVVSVLTVLHQDWLNGKEYKCKVSNKALGAPIEKTISKAKGQPREPQVYTLPPSRDELTKNQVSLWCLVKGFYPSDIAVEWESYGTEWSNYKTTPPVLDSDGSFFLYSKLTVSKEEWQQGFVFSCSVMHEALHNHYTQKSLSLSPGK

SEQ ID NO: 130 - protein, 217 aa, Artificial Sequence
  Description of Artificial Sequence: Synthetic polypeptide
APEAAGGPSVFLFPPKPKDTLMISRTPEVTCVVVDVSHEDPEVKFNWYVDGVEVHNAKTKPREEQYNSTYRVVSVLTVLHQDWLNGKEYKCKVSNKALPAPIEKTISKAKGQPREPQVYTLPPSRDELTKNQVSLWCLVKGFYPSDIAVEWESYGTEWSNYKTTPPVLDSDGSFFLYSKLTVSKEEWQQGFVFSCSVLHEALHSHYTQKSLSLSPGK

SEQ ID NO: 131 - protein, 217 aa, Artificial Sequence
  Description of Artificial Sequence: Synthetic polypeptide
APEAAGGPSVFLFPPKPKDTLMISRTPEVTCVVVDVSHEDPEVKFNWYVDGVEVHNAKTKPREEQYNSTYRVVSVLTVLHQDWLNGKEYKCKVSNKALGAPIEKTISKAKGQPREPQVYTLPPSRDELTKNQVSLWCLVKGFYPSDIAVEWESYGTEWSNYKTTPPVLDSDGSFFLYSKLTVSKEEWQQGFVFSCSVLHEALHSHYTQKSLSLSPGK

SEQ ID NO: 132 - protein, 217 aa, Artificial Sequence
  Description of Artificial Sequence: Synthetic polypeptide
APELLGGPSVFLFPPKPKDTLMISRTPEVTCVVVDVSHEDPEVKFNWYVDGVEVHNAKTKPREEQYNSTYRVVSVLTVLHQDWLNGKEYKCKVSNKALPAPIEKTISKAKGQPREPQVYTLPPSRDELTKNQVSLSCAVKGFYPSDIAVEWESYGTEWSNYKTTPPVLDSDGSFFLVSKLTVSKEEWQQGFVFSCSVMHEALHNHYTQKSLSLSPGK

SEQ ID NO: 133 - protein, 217 aa, Artificial Sequence
  Description of Artificial Sequence: Synthetic polypeptide
APEAAGGPSVFLFPPKPKDTLMISRTPEVTCVVVDVSHEDPEVKFNWYVDGVEVHNAKTKPREEQYNSTYRVVSVLTVLHQDWLNGKEYKCKVSNKALPAPIEKTISKAKGQPREPQVYTLPPSRDELTKNQVSLSCAVKGFYPSDIAVEWESYGTEWSNYKTTPPVLDSDGSFFLVSKLTVSKEEWQQGFVFSCSVMHEALHNHYTQKSLSLSPGK

SEQ ID NO: 134 - protein, 217 aa, Artificial Sequence
  Description of Artificial Sequence: Synthetic polypeptide
APEAAGGPSVFLFPPKPKDTLMISRTPEVTCVVVDVSHEDPEVKFNWYVDGVEVHNAKTKPREEQYNSTYRVVSVLTVLHQDWLNGKEYKCKVSNKALGAPIEKTISKAKGQPREPQVYTLPPSRDELTKNQVSLSCAVKGFYPSDIAVEWESYGTEWSNYKTTPPVLDSDGSFFLVSKLTVSKEEWQQGFVFSCSVMHEALHNHYTQKSLSLSPGK

SEQ ID NO: 135 - protein, 217 aa, Artificial Sequence
  Description of Artificial Sequence: Synthetic polypeptide
APELLGGPSVFLFPPKPKDTLYITREPEVTCVVVDVSHEDPEVKFNWYVDGVEVHNAKTKPREEQYNSTYRVVSVLTVLHQDWLNGKEYKCKVSNKALPAPIEKTISKAKGQPREPQVYTLPPSRDELTKNQVSLSCAVKGFYPSDIAVEWESYGTEWSNYKTTPPVLDSDGSFFLVSKLTVSKEEWQQGFVFSCSVMHEALHNHYTQKSLSLSPGK

SEQ ID NO: 136 - protein, 217 aa, Artificial Sequence
  Description of Artificial Sequence: Synthetic polypeptide
APELLGGPSVFLFPPKPKDTLMISRTPEVTCVVVDVSHEDPEVKFNWYVDGVEVHNAKTKPREEQYNSTYRVVSVLTVLHQDWLNGKEYKCKVSNKALPAPIEKTISKAKGQPREPQVYTLPPSRDELTKNQVSLSCAVKGFYPSDIAVEWESYGTEWSNYKTTPPVLDSDGSFFLVSKLTVSKEEWQQGFVFSCSVLHEALHSHYTQKSLSLSPGK

SEQ ID NO: 137 - protein, 217 aa, Artificial Sequence
  Description of Artificial Sequence: Synthetic polypeptide
APEAAGGPSVFLFPPKPKDTLYITREPEVTCVVVDVSHEDPEVKFNWYVDGVEVHNAKTKPREEQYNSTYRVVSVLTVLHQDWLNGKEYKCKVSNKALPAPIEKTISKAKGQPREPQVYTLPPSRDELTKNQVSLSCAVKGFYPSDIAVEWESYGTEWSNYKTTPPVLDSDGSFFLVSKLTVSKEEWQQGFVFSCSVMHEALHNHYTQKSLSLSPGK

SEQ ID NO: 138 - protein, 217 aa, Artificial Sequence
  Description of Artificial Sequence: Synthetic polypeptide
APEAAGGPSVFLFPPKPKDTLYITREPEVTCVVVDVSHEDPEVKFNWYVDGVEVHNAKTKPREEQYNSTYRVVSVLTVLHQDWLNGKEYKCKVSNKALGAPIEKTISKAKGQPREPQVYTLPPSRDELTKNQVSLSCAVKGFYPSDIAVEWESYGTEWSNYKTTPPVLDSDGSFFLVSKLTVSKEEWQQGFVFSCSVMHEALHNHYTQKSLSLSPGK

SEQ ID NO: 139 - protein, 217 aa, Artificial Sequence
  Description of Artificial Sequence: Synthetic polypeptide
APEAAGGPSVFLFPPKPKDTLMISRTPEVTCVVVDVSHEDPEVKFNWYVDGVEVHNAKTKPREEQYNSTYRVVSVLTVLHQDWLNGKEYKCKVSNKALPAPIEKTISKAKGQPREPQVYTLPPSRDELTKNQVSLSCAVKGFYPSDIAVEWESYGTEWSNYKTTPPVLDSDGSFFLVSKLTVSKEEWQQGFVFSCSVLHEALHSHYTQKSLSLSPGK

SEQ ID NO: 140 - protein, 217 aa, Artificial Sequence
  Description of Artificial Sequence: Synthetic polypeptide
APEAAGGPSVFLFPPKPKDTLMISRTPEVTCVVVDVSHEDPEVKFNWYVDGVEVHNAKTKPREEQYNSTYRVVSVLTVLHQDWLNGKEYKCKVSNKALGAPIEKTISKAKGQPREPQVYTLPPSRDELTKNQVSLSCAVKGFYPSDIAVEWESYGTEWSNYKTTPPVLDSDGSFFLVSKLTVSKEEWQQGFVFSCSVLHEALHSHYTQKSLSLSPGK

SEQ ID NO: 141 - protein, 217 aa, Artificial Sequence
  Description of Artificial Sequence: Synthetic polypeptide
APELLGGPSVFLFPPKPKDTLMISRTPEVTCVVVDVSHEDPEVKFNWYVDGVEVHNAKTKPREEQYNSTYRVVSVLTVLHQDWLNGKEYKCKVSNKALPAPIEKTISKAKGQPREPQVYTLPPSRDELTKNQVSLWCLVKGFYPSDIAVEWESYGTEWSNYKTTPPVLDSDGSFFLYSKLTVTKEEWQQGFVFSCSVMHEALHNHYTQKSLSLSPGK

SEQ ID NO: 142 - protein, 217 aa, Artificial Sequence
  Description of Artificial Sequence: Synthetic polypeptide
APEAAGGPSVFLFPPKPKDTLMISRTPEVTCVVVDVSHEDPEVKFNWYVDGVEVHNAKTKPREEQYNSTYRVVSVLTVLHQDWLNGKEYKCKVSNKALPAPIEKTISKAKGQPREPQVYTLPPSRDELTKNQVSLWCLVKGFYPSDIAVEWESYGTEWSNYKTTPPVLDSDGSFFLYSKLTVTKEEWQQGFVFSCSVMHEALHNHYTQKSLSLSPGK

SEQ ID NO: 143 - protein, 217 aa, Artificial Sequence
  Description of Artificial Sequence: Synthetic polypeptide
APEAAGGPSVFLFPPKPKDTLMISRTPEVTCVVVDVSHEDPEVKFNWYVDGVEVHNAKTKPREEQYNSTYRVVSVLTVLHQDWLNGKEYKCKVSNKALGAPIEKTISKAKGQPREPQVYTLPPSRDELTKNQVSLWCLVKGFYPSDIAVEWESYGTEWSNYKTTPPVLDSDGSFFLYSKLTVTKEEWQQGFVFSCSVMHEALHNHYTQKSLSLSPGK

SEQ ID NO: 144 - protein, 217 aa, Artificial Sequence
  Description of Artificial Sequence: Synthetic polypeptide
APELLGGPSVFLFPPKPKDTLYITREPEVTCVVVDVSHEDPEVKFNWYVDGVEVHNAKTKPREEQYNSTYRVVSVLTVLHQDWLNGKEYKCKVSNKALPAPIEKTISKAKGQPREPQVYTLPPSRDELTKNQVSLWCLVKGFYPSDIAVEWESYGTEWSNYKTTPPVLDSDGSFFLYSKLTVTKEEWQQGFVFSCSVMHEALHNHYTQKSLSLSPGK

SEQ ID NO: 145 - protein, 217 aa, Artificial Sequence
  Description of Artificial Sequence: Synthetic polypeptide
APELLGGPSVFLFPPKPKDTLMISRTPEVTCVVVDVSHEDPEVKFNWYVDGVEVHNAKTKPREEQYNSTYRVVSVLTVLHQDWLNGKEYKCKVSNKALPAPIEKTISKAKGQPREPQVYTLPPSRDELTKNQVSLWCLVKGFYPSDIAVEWESYGTEWSNYKTTPPVLDSDGSFFLYSKLTVTKEEWQQGFVFSCSVLHEALHSHYTQKSLSLSPGK

SEQ ID NO: 146 - protein, 217 aa, Artificial Sequence
  Description of Artificial Sequence: Synthetic polypeptide
APEAAGGPSVFLFPPKPKDTLYITREPEVTCVVVDVSHEDPEVKFNWYVDGVEVHNAKTKPREEQYNSTYRVVSVLTVLHQDWLNGKEYKCKVSNKALPAPIEKTISKAKGQPREPQVYTLPPSRDELTKNQVSLWCLVKGFYPSDIAVEWESYGTEWSNYKTTPPVLDSDGSFFLYSKLTVTKEEWQQGFVFSCSVMHEALHNHYTQKSLSLSPGK

SEQ ID NO: 147 - protein, 217 aa, Artificial Sequence
  Description of Artificial Sequence: Synthetic polypeptide
APEAAGGPSVFLFPPKPKDTLYITREPEVTCVVVDVSHEDPEVKFNWYVDGVEVHNAKTKPREEQYNSTYRVVSVLTVLHQDWLNGKEYKCKVSNKALGAPIEKTISKAKGQPREPQVYTLPPSRDELTKNQVSLWCLVKGFYPSDIAVEWESYGTEWSNYKTTPPVLDSDGSFFLYSKLTVTKEEWQQGFVFSCSVMHEALHNHYTQKSLSLSPGK

SEQ ID NO: 148 - protein, 217 aa, Artificial Sequence
  Description of Artificial Sequence: Synthetic polypeptide
APEAAGGPSVFLFPPKPKDTLMISRTPEVTCVVVDVSHEDPEVKFNWYVDGVEVHNAKTKPREEQYNSTYRVVSVLTVLHQDWLNGKEYKCKVSNKALPAPIEKTISKAKGQPREPQVYTLPPSRDELTKNQVSLWCLVKGFYPSDIAVEWESYGTEWSNYKTTPPVLDSDGSFFLYSKLTVTKEEWQQGFVFSCSVLHEALHSHYTQKSLSLSPGK

SEQ ID NO: 149 - protein, 217 aa, Artificial Sequence
  Description of Artificial Sequence: Synthetic polypeptide
APEAAGGPSVFLFPPKPKDTLMISRTPEVTCVVVDVSHEDPEVKFNWYVDGVEVHNAKTKPREEQYNSTYRVVSVLTVLHQDWLNGKEYKCKVSNKALGAPIEKTISKAKGQPREPQVYTLPPSRDELTKNQVSLWCLVKGFYPSDIAVEWESYGTEWSNYKTTPPVLDSDGSFFLYSKLTVTKEEWQQGFVFSCSVLHEALHSHYTQKSLSLSPGK

SEQ ID NO: 150 - protein, 217 aa, Artificial Sequence
  Description of Artificial Sequence: Synthetic polypeptide
APELLGGPSVFLFPPKPKDTLMISRTPEVTCVVVDVSHEDPEVKFNWYVDGVEVHNAKTKPREEQYNSTYRVVSVLTVLHQDWLNGKEYKCKVSNKALPAPIEKTISKAKGQPREPQVYTLPPSRDELTKNQVSLSCAVKGFYPSDIAVEWESYGTEWSNYKTTPPVLDSDGSFFLVSKLTVTKEEWQQGFVFSCSVMHEALHNHYTQKSLSLSPGK

SEQ ID NO: 151 - protein, 217 aa, Artificial Sequence
  Description of Artificial Sequence: Synthetic polypeptide
APEAAGGPSVFLFPPKPKDTLMISRTPEVTCVVVDVSHEDPEVKFNWYVDGVEVHNAKTKPREEQYNSTYRVVSVLTVLHQDWLNGKEYKCKVSNKALPAPIEKTISKAKGQPREPQVYTLPPSRDELTKNQVSLSCAVKGFYPSDIAVEWESYGTEWSNYKTTPPVLDSDGSFFLVSKLTVTKEEWQQGFVFSCSVMHEALHNHYTQKSLSLSPGK

SEQ ID NO: 152 - protein, 217 aa, Artificial Sequence
  Description of Artificial Sequence: Synthetic polypeptide
APEAAGGPSVFLFPPKPKDTLMISRTPEVTCVVVDVSHEDPEVKFNWYVDGVEVHNAKTKPREEQYNSTYRVVSVLTVLHQDWLNGKEYKCKVSNKALGAPIEKTISKAKGQPREPQVYTLPPSRDELTKNQVSLSCAVKGFYPSDIAVEWESYGTEWSNYKTTPPVLDSDGSFFLVSKLTVTKEEWQQGFVFSCSVMHEALHNHYTQKSLSLSPGK

SEQ ID NO: 153 - protein, 217 aa, Artificial Sequence
  Description of Artificial Sequence: Synthetic polypeptide
APELLGGPSVFLFPPKPKDTLYITREPEVTCVVVDVSHEDPEVKFNWYVDGVEVHNAKTKPREEQYNSTYRVVSVLTVLHQDWLNGKEYKCKVSNKALPAPIEKTISKAKGQPREPQVYTLPPSRDELTKNQVSLSCAVKGFYPSDIAVEWESYGTEWSNYKTTPPVLDSDGSFFLVSKLTVTKEEWQQGFVFSCSVMHEALHNHYTQKSLSLSPGK

SEQ ID NO: 154 - protein, 217 aa, Artificial Sequence
  Description of Artificial Sequence: Synthetic polypeptide
APELLGGPSVFLFPPKPKDTLMISRTPEVTCVVVDVSHEDPEVKFNWYVDGVEVHNAKTKPREEQYNSTYRVVSVLTVLHQDWLNGKEYKCKVSNKALPAPIEKTISKAKGQPREPQVYTLPPSRDELTKNQVSLSCAVKGFYPSDIAVEWESYGTEWSNYKTTPPVLDSDGSFFLVSKLTVTKEEWQQGFVFSCSVLHEALHSHYTQKSLSLSPGK

SEQ ID NO: 155 - protein, 217 aa, Artificial Sequence
  Description of Artificial Sequence: Synthetic polypeptide
APEAAGGPSVFLFPPKPKDTLYITREPEVTCVVVDVSHEDPEVKFNWYVDGVEVHNAKTKPREEQYNSTYRVVSVLTVLHQDWLNGKEYKCKVSNKALPAPIEKTISKAKGQPREPQVYTLPPSRDELTKNQVSLSCAVKGFYPSDIAVEWESYGTEWSNYKTTPPVLDSDGSFFLVSKLTVTKEEWQQGFVFSCSVMHEALHNHYTQKSLSLSPGK

SEQ ID NO: 156 - protein, 217 aa, Artificial Sequence
  Description of Artificial Sequence: Synthetic polypeptide
APEAAGGPSVFLFPPKPKDTLYITREPEVTCVVVDVSHEDPEVKFNWYVDGVEVHNAKTKPREEQYNSTYRVVSVLTVLHQDWLNGKEYKCKVSNKALGAPIEKTISKAKGQPREPQVYTLPPSRDELTKNQVSLSCAVKGFYPSDIAVEWESYGTEWSNYKTTPPVLDSDGSFFLVSKLTVTKEEWQQGFVFSCSVMHEALHNHYTQKSLSLSPGK

SEQ ID NO: 157 - protein, 217 aa, Artificial Sequence
  Description of Artificial Sequence: Synthetic polypeptide
APEAAGGPSVFLFPPKPKDTLMISRTPEVTCVVVDVSHEDPEVKFNWYVDGVEVHNAKTKPREEQYNSTYRVVSVLTVLHQDWLNGKEYKCKVSNKALPAPIEKTISKAKGQPREPQVYTLPPSRDELTKNQVSLSCAVKGFYPSDIAVEWESYGTEWSNYKTTPPVLDSDGSFFLVSKLTVTKEEWQQGFVFSCSVLHEALHSHYTQKSLSLSPGK

SEQ ID NO: 158 - protein, 217 aa, Artificial Sequence
  Description of Artificial Sequence: Synthetic polypeptide
APEAAGGPSVFLFPPKPKDTLMISRTPEVTCVVVDVSHEDPEVKFNWYVDGVEVHNAKTKPREEQYNSTYRVVSVLTVLHQDWLNGKEYKCKVSNKALGAPIEKTISKAKGQPREPQVYTLPPSRDELTKNQVSLSCAVKGFYPSDIAVEWESYGTEWSNYKTTPPVLDSDGSFFLVSKLTVTKEEWQQGFVFSCSVLHEALHSHYTQKSLSLSPGK

SEQ ID NO: 159 - protein, 217 aa, Artificial Sequence
  Description of Artificial Sequence: Synthetic polypeptide
APELLGGPSVFLFPPKPKDTLMISRTPEVTCVVVDVSHEDPEVKFNWYVDGVEVHNAKTKPREEQYNSTYRVVSVLTVLHQDWLNGKEYKCKVSNKALPAPIEKTISKAKGQPREPQVYTLPPSRDELTKNQVSLWCLVKGFYPSDIAVEWESFGTEWSNYKTTPPVLDSDGSFFLYSKLTVSKEEWQQGFVFSCSVMHEALHNHYTQKSLSLSPGK

SEQ ID NO: 160 - protein, 217 aa, Artificial Sequence
  Description of Artificial Sequence: Synthetic polypeptide
APEAAGGPSVFLFPPKPKDTLMISRTPEVTCVVVDVSHEDPEVKFNWYVDGVEVHNAKTKPREEQYNSTYRVVSVLTVLHQDWLNGKEYKCKVSNKALPAPIEKTISKAKGQPREPQVYTLPPSRDELTKNQVSLWCLVKGFYPSDIAVEWESFGTEWSNYKTTPPVLDSDGSFFLYSKLTVSKEEWQQGFVFSCSVMHEALHNHYTQKSLSLSPGK

SEQ ID NO: 161 - protein, 217 aa, Artificial Sequence
  Description of Artificial Sequence: Synthetic polypeptide
APEAAGGPSVFLFPPKPKDTLMISRTPEVTCVVVDVSHEDPEVKFNWYVDGVEVHNAKTKPREEQYNSTYRVVSVLTVLHQDWLNGKEYKCKVSNKALGAPIEKTISKAKGQPREPQVYTLPPSRDELTKNQVSLWCLVKGFYPSDIAVEWESFGTEWSNYKTTPPVLDSDGSFFLYSKLTVSKEEWQQGFVFSCSVMHEALHNHYTQKSLSLSPGK

SEQ ID NO: 162 - protein, 217 aa, Artificial Sequence
  Description of Artificial Sequence: Synthetic polypeptide
APELLGGPSVFLFPPKPKDTLYITREPEVTCVVVDVSHEDPEVKFNWYVDGVEVHNAKTKPREEQYNSTYRVVSVLTVLHQDWLNGKEYKCKVSNKALPAPIEKTISKAKGQPREPQVYTLPPSRDELTKNQVSLWCLVKGFYPSDIAVEWESFGTEWSNYKTTPPVLDSDGSFFLYSKLTVSKEEWQQGFVFSCSVMHEALHNHYTQKSLSLSPGK

SEQ ID NO: 163 - protein, 217 aa, Artificial Sequence
  Description of Artificial Sequence: Synthetic polypeptide
APELLGGPSVFLFPPKPKDTLMISRTPEVTCVVVDVSHEDPEVKFNWYVDGVEVHNAKTKPREEQYNSTYRVVSVLTVLHQDWLNGKEYKCKVSNKALPAPIEKTISKAKGQPREPQVYTLPPSRDELTKNQVSLWCLVKGFYPSDIAVEWESFGTEWSNYKTTPPVLDSDGSFFLYSKLTVSKEEWQQGFVFSCSVLHEALHSHYTQKSLSLSPGK

SEQ ID NO: 164 - protein, 217 aa, Artificial Sequence
  Description of Artificial Sequence: Synthetic polypeptide
APEAAGGPSVFLFPPKPKDTLYITREPEVTCVVVDVSHEDPEVKFNWYVDGVEVHNAKTKPREEQYNSTYRVVSVLTVLHQDWLNGKEYKCKVSNKALPAPIEKTISKAKGQPREPQVYTLPPSRDELTKNQVSLWCLVKGFYPSDIAVEWESFGTEWSNYKTTPPVLDSDGSFFLYSKLTVSKEEWQQGFVFSCSVMHEALHNHYTQKSLSLSPGK

SEQ ID NO: 165 - protein, 217 aa, Artificial Sequence
  Description of Artificial Sequence: Synthetic polypeptide
APEAAGGPSVFLFPPKPKDTLYITREPEVTCVVVDVSHEDPEVKFNWYVDGVEVHNAKTKPREEQYNSTYRVVSVLTVLHQDWLNGKEYKCKVSNKALGAPIEKTISKAKGQPREPQVYTLPPSRDELTKNQVSLWCLVKGFYPSDIAVEWESFGTEWSNYKTTPPVLDSDGSFFLYSKLTVSKEEWQQGFVFSCSVMHEALHNHYTQKSLSLSPGK

SEQ ID NO: 166 - protein, 217 aa, Artificial Sequence
  Description of Artificial Sequence: Synthetic polypeptide
APEAAGGPSVFLFPPKPKDTLMISRTPEVTCVVVDVSHEDPEVKFNWYVDGVEVHNAKTKPREEQYNSTYRVVSVLTVLHQDWLNGKEYKCKVSNKALPAPIEKTISKAKGQPREPQVYTLPPSRDELTKNQVSLWCLVKGFYPSDIAVEWESFGTEWSNYKTTPPVLDSDGSFFLYSKLTVSKEEWQQGFVFSCSVLHEALHSHYTQKSLSLSPGK

SEQ ID NO: 167 - protein, 217 aa, Artificial Sequence
  Description of Artificial Sequence: Synthetic polypeptide
APEAAGGPSVFLFPPKPKDTLMISRTPEVTCVVVDVSHEDPEVKFNWYVDGVEVHNAKTKPREEQYNSTYRVVSVLTVLHQDWLNGKEYKCKVSNKALGAPIEKTISKAKGQPREPQVYTLPPSRDELTKNQVSLWCLVKGFYPSDIAVEWESFGTEWSNYKTTPPVLDSDGSFFLYSKLTVSKEEWQQGFVFSCSVLHEALHSHYTQKSLSLSPGK

SEQ ID NO: 168 - protein, 217 aa, Artificial Sequence
  Description of Artificial Sequence: Synthetic polypeptide
APELLGGPSVFLFPPKPKDTLMISRTPEVTCVVVDVSHEDPEVKFNWYVDGVEVHNAKTKPREEQYNSTYRVVSVLTVLHQDWLNGKEYKCKVSNKALPAPIEKTISKAKGQPREPQVYTLPPSRDELTKNQVSLSCAVKGFYPSDIAVEWESFGTEWSNYKTTPPVLDSDGSFFLVSKLTVSKEEWQQGFVFSCSVMHEALHNHYTQKSLSLSPGK

SEQ ID NO: 169 - protein, 217 aa, Artificial Sequence
  Description of Artificial Sequence: Synthetic polypeptide
APEAAGGPSVFLFPPKPKDTLMISRTPEVTCVVVDVSHEDPEVKFNWYVDGVEVHNAKTKPREEQYNSTYRVVSVLTVLHQDWLNGKEYKCKVSNKALPAPIEKTISKAKGQPREPQVYTLPPSRDELTKNQVSLSCAVKGFYPSDIAVEWESFGTEWSNYKTTPPVLDSDGSFFLVSKLTVSKEEWQQGFVFSCSVMHEALHNHYTQKSLSLSPGK

SEQ ID NO: 170 - protein, 217 aa, Artificial Sequence
  Description of Artificial Sequence: Synthetic polypeptide
APEAAGGPSVFLFPPKPKDTLMISRTPEVTCVVVDVSHEDPEVKFNWYVDGVEVHNAKTKPREEQYNSTYRVVSVLTVLHQDWLNGKEYKCKVSNKALGAPIEKTISKAKGQPREPQVYTLPPSRDELTKNQVSLSCAVKGFYPSDIAVEWESFGTEWSNYKTTPPVLDSDGSFFLVSKLTVSKEEWQQGFVFSCSVMHEALHNHYTQKSLSLSPGK

SEQ ID NO: 171 - protein, 217 aa, Artificial Sequence
  Description of Artificial Sequence: Synthetic polypeptide
APELLGGPSVFLFPPKPKDTLYITREPEVTCVVVDVSHEDPEVKFNWYVDGVEVHNAKTKPREEQYNSTYRVVSVLTVLHQDWLNGKEYKCKVSNKALPAPIEKTISKAKGQPREPQVYTLPPSRDELTKNQVSLSCAVKGFYPSDIAVEWESFGTEWSNYKTTPPVLDSDGSFFLVSKLTVSKEEWQQGFVFSCSVMHEALHNHYTQKSLSLSPGK

SEQ ID NO: 172 - protein, 217 aa, Artificial Sequence
  Description of Artificial Sequence: Synthetic polypeptide
APELLGGPSVFLFPPKPKDTLMISRTPEVTCVVVDVSHEDPEVKFNWYVDGVEVHNAKTKPREEQYNSTYRVVSVLTVLHQDWLNGKEYKCKVSNKALPAPIEKTISKAKGQPREPQVYTLPPSRDELTKNQVSLSCAVKGFYPSDIAVEWESFGTEWSNYKTTPPVLDSDGSFFLVSKLTVSKEEWQQGFVFSCSVLHEALHSHYTQKSLSLSPGK

SEQ ID NO: 173 - protein, 217 aa, Artificial Sequence
  Description of Artificial Sequence: Synthetic polypeptide
APEAAGGPSVFLFPPKPKDTLYITREPEVTCVVVDVSHEDPEVKFNWYVDGVEVHNAKTKPREEQYNSTYRVVSVLTVLHQDWLNGKEYKCKVSNKALPAPIEKTISKAKGQPREPQVYTLPPSRDELTKNQVSLSCAVKGFYPSDIAVEWESFGTEWSNYKTTPPVLDSDGSFFLVSKLTVSKEEWQQGFVFSCSVMHEALHNHYTQKSLSLSPGK

SEQ ID NO: 174 - protein, 217 aa, Artificial Sequence
  Description of Artificial Sequence: Synthetic polypeptide
APEAAGGPSVFLFPPKPKDTLYITREPEVTCVVVDVSHEDPEVKFNWYVDGVEVHNAKTKPREEQYNSTYRVVSVLTVLHQDWLNGKEYKCKVSNKALGAPIEKTISKAKGQPREPQVYTLPPSRDELTKNQVSLSCAVKGFYPSDIAVEWESFGTEWSNYKTTPPVLDSDGSFFLVSKLTVSKEEWQQGFVFSCSVMHEALHNHYTQKSLSLSPGK

SEQ ID NO: 175 - protein, 217 aa, Artificial Sequence
  Description of Artificial Sequence: Synthetic polypeptide
APEAAGGPSVFLFPPKPKDTLMISRTPEVTCVVVDVSHEDPEVKFNWYVDGVEVHNAKTKPREEQYNSTYRVVSVLTVLHQDWLNGKEYKCKVSNKALPAPIEKTISKAKGQPREPQVYTLPPSRDELTKNQVSLSCAVKGFYPSDIAVEWESFGTEWSNYKTTPPVLDSDGSFFLVSKLTVSKEEWQQGFVFSCSVLHEALHSHYTQKSLSLSPGK

SEQ ID NO: 176 - protein, 217 aa, Artificial Sequence
  Description of Artificial Sequence: Synthetic polypeptide
APEAAGGPSVFLFPPKPKDTLMISRTPEVTCVVVDVSHEDPEVKFNWYVDGVEVHNAKTKPREEQYNSTYRVVSVLTVLHQDWLNGKEYKCKVSNKALGAPIEKTISKAKGQPREPQVYTLPPSRDELTKNQVSLSCAVKGFYPSDIAVEWESFGTEWSNYKTTPPVLDSDGSFFLVSKLTVSKEEWQQGFVFSCSVLHEALHSHYTQKSLSLSPGK

SEQ ID NO: 177 - protein, 217 aa, Artificial Sequence
  Description of Artificial Sequence: Synthetic polypeptide
APELLGGPSVFLFPPKPKDTLMISRTPEVTCVVVDVSHEDPEVKFNWYVDGVEVHNAKTKPREEQYNSTYRVVSVLTVLHQDWLNGKEYKCKVSNKALPAPIEKTISKAKGQPREPQVYTLPPSRDELTKNQVSLTCLVKGFYPSDIAVEWESYGTEWSNYKTTPPVLDSDGSFFLYSKLTVTKEEWQQGFVFSCSVMHEALHNHYTQKSLSLSPGK

SEQ ID NO: 178 - protein, 217 aa, Artificial Sequence
  Description of Artificial Sequence: Synthetic polypeptide
APELLGGPSVFLFPPKPKDTLMISRTPEVTCVVVDVSHEDPEVKFNWYVDGVEVHNAKTKPREEQYNSTYRVVSVLTVLHQDWLNGKEYKCKVSNKALPAPIEKTISKAKGQPREPQVYTLPPSRDELTKNQVSLTCLVKGFYPSDIAVEWESYGTEWVNYKTTPPVLDSDGSFFLYSKLTVTKEEWQQGFVFSCSVMHEALHNHYTQKSLSLSPGK

SEQ ID NO: 179 - protein, 217 aa, Artificial Sequence
  Description of Artificial Sequence: Synthetic polypeptide
APELLGGPSVFLFPPKPKDTLMISRTPEVTCVVVDVSHEDPEVKFNWYVDGVEVHNAKTKPREEQYNSTYRVVSVLTVLHQDWLNGKEYKCKVSNKALPAPIEKTISKAKGQPREPQVYTLPPSRDELTKNQVSLTCLVKGFYPSDIAVEWESYGTEWSNYKTTPPVLDSDGSFFLYSKLTVSKEEWQQGFVFSCSVMHEALHNHYTQKSLSLSPGK

SEQ ID NO: 180 - protein, 217 aa, Artificial Sequence
  Description of Artificial Sequence: Synthetic polypeptide
APELLGGPSVFLFPPKPKDTLMISRTPEVTCVVVDVSHEDPEVKFNWYVDGVEVHNAKTKPREEQYNSTYRVVSVLTVLHQDWLNGKEYKCKVSNKALPAPIEKTISKAKGQPREPQVYTLPPSRDELTKNQVSLTCLVKGFYPSDIAVEWESFGTEWSNYKTTPPVLDSDGSFFLYSKLTVSKEEWQQGFVFSCSVMHEALHNHYTQKSLSLSPGK

SEQ ID NO: 181 - protein, 217 aa, Artificial Sequence
  Description of Artificial Sequence: Synthetic polypeptide
APELLGGPSVFLFPPKPKDTLMISRTPEVTCVVVDVSHEDPEVKFNWYVDGVEVHNAKTKPREEQYNSTYRVVSVLTVLHQDWLNGKEYKCKVSNKALPAPIEKTISKAKGQPREPQVYTLPPSRDELTKNQVSLTCLVKGFYPSDIAVLWESLGHVWAVYKTTPPVLDSDGSFFLYSKLTVPKSTWQQGWVFSCSVMHEALHNHYTQKSLSLSPGK

SEQ ID NO: 182 - protein, 217 aa, Artificial Sequence
  Description of Artificial Sequence: Synthetic polypeptide
APELLGGPSVFLFPPKPKDTLMISRTPEVTCVVVDVSHEDPEVKFNWYVDGVEVHNAKTKPREEQYNSTYRVVSVLTVLHQDWLNGKEYKCKVSNKALPAPIEKTISKAKGQPREPQVYTLPPSRDELTKNQVSLTCLVKGFYPSDIAVYWESLGHVWAVYKTTPPVLDSDGSFFLYSKLTVPKSTWQQGWVFSCSVMHEALHNHYTQKSLSLSPGK

SEQ ID NO: 183 - protein, 217 aa, Artificial Sequence
  Description of Artificial Sequence: Synthetic polypeptide
APELLGGPSVFLFPPKPKDTLMISRTPEVTCVVVDVSHEDPEVKFNWYVDGVEVHNAKTKPREEQYNSTYRVVSVLTVLHQDWLNGKEYKCKVSNKALPAPIEKTISKAKGQPREPQVYTLPPSRDELTKNQVSLTCLVKGFYPSDIAVEWESLGHVWAVYFTTPPVLDSDGSFFLYSKLTVPKSTWQQGWVFSCSVMHEALHNHYTQKSLSLSPGK

SEQ ID NO: 184 - protein, 217 aa, Artificial Sequence
  Description of Artificial Sequence: Synthetic polypeptide
APELLGGPSVFLFPPKPKDTLMISRTPEVTCVVVDVSHEDPEVKFNWYVDGVEVHNAKTKPREEQYNSTYRVVSVLTVLHQDWLNGKEYKCKVSNKALPAPIEKTISKAKGQPREPQVYTLPPSRDELTKNQVSLTCLVKGFYPSDIAVEWESLGHVWAVYHTTPPVLDSDGSFFLYSKLTVPKSTWQQGWVFSCSVMHEALHNHYTQKSLSLSPGK

SEQ ID NO: 185 - protein, 217 aa, Artificial Sequence
  Description of Artificial Sequence: Synthetic polypeptide
APELLGGPSVFLFPPKPKDTLMISRTPEVTCVVVDVSHEDPEVKFNWYVDGVEVHNAKTKPREEQYNSTYRVVSVLTVLHQDWLNGKEYKCKVSNKALPAPIEKTISKAKGQPREPQVYTLPPSRDELTKNQVSLTCLVKGFYPSDIAVWWESLGHVWAVYKTTPPVLDSDGSFFLYSKLTVPKSTWQQGWVFSCSVMHEALHNHYTQKSLSLSPGK

SEQ ID NO: 186 - protein, 217 aa, Artificial Sequence
  Description of Artificial Sequence: Synthetic polypeptide
APELLGGPSVFLFPPKPKDTLMISRTPEVTCVVVDVSHEDPEVKFNWYVDGVEVHNAKTKPREEQYNSTYRVVSVLTVLHQDWLNGKEYKCKVSNKALPAPIEKTISKAKGQPREPQVYTLPPSRDELTKNQVSLTCLVKGFYPSDIAVEWESLGHVWAVYQTTPPVLDSDGSFFLYSKLTVPKSTWQQGWVFSCSVMHEALHNHYTQKSLSLSPGK

SEQ ID NO: 187 - protein, 217 aa, Artificial Sequence
  Description of Artificial Sequence: Synthetic polypeptide
APELLGGPSVFLFPPKPKDTLMISRTPEVTCVVVDVSHEDPEVKFNWYVDGVEVHNAKTKPREEQYNSTYRVVSVLTVLHQDWLNGKEYKCKVSNKALPAPIEKTISKAKGQPREPQVYTLPPSRDELTKNQVSLTCLVKGFYPSDIAVWWESLGHVWAVYQTTPPVLDSDGSFFLYSKLTVPKSTWQQGWVFSCSVMHEALHNHYTQKSLSLSPGK

SEQ ID NO: 188 - protein, 217 aa, Artificial Sequence
  Description of Artificial Sequence: Synthetic polypeptide
APELLGGPSVFLFPPKPKDTLMISRTPEVTCVVVDVSHEDPEVKFNWYVDGVEVHNAKTKPREEQYNSTYRVVSVLTVLHQDWLNGKEYKCKVSNKALPAPIEKTISKAKGQPREPQVYTLPPSRDELTKNQVSLTCLVKGFYPSDIAVWWESLGHVWVNQKTTPPVLDSDGSFFLYSKLTVPKSTWQQGWVFSCSVMHEALHNHYTQKSLSLSPGK

SEQ ID NO: 189 - protein, 217 aa, Artificial Sequence
  Description of Artificial Sequence: Synthetic polypeptide
APELLGGPSVFLFPPKPKDTLMISRTPEVTCVVVDVSHEDPEVKFNWYVDGVEVHNAKTKPREEQYNSTYRVVSVLTVLHQDWLNGKEYKCKVSNKALPAPIEKTISKAKGQPREPQVYTLPPSRDELTKNQVSLTCLVKGFYPSDIAVEWESLGHVWVNQQTTPPVLDSDGSFFLYSKLTVPKSTWQQGWVFSCSVMHEALHNHYTQKSLSLSPGK

SEQ ID NO: 190 - protein, 217 aa, Artificial Sequence
  Description of Artificial Sequence: Synthetic polypeptide
APELLGGPSVFLFPPKPKDTLMISRTPEVTCVVVDVSHEDPEVKFNWYVDGVEVHNAKTKPREEQYNSTYRVVSVLTVLHQDWLNGKEYKCKVSNKALPAPIEKTISKAKGQPREPQVYTLPPSRDELTKNQVSLTCLVKGFYPSDIAVWWESLGHVWVNQQTTPPVLDSDGSFFLYSKLTVPKSTWQQGWVFSCSVMHEALHNHYTQKSLSLSPGK

SEQ ID NO: 191 - protein, 217 aa, Artificial Sequence
  Description of Artificial Sequence: Synthetic polypeptide
APELLGGPSVFLFPPKPKDTLMISRTPEVTCVVVDVSHEDPEVKFNWYVDGVEVHNAKTKPREEQYNSTYRVVSVLTVLHQDWLNGKEYKCKVSNKALPAPIEKTISKAKGQPREPQVYTLPPSRDELTKNQVSLTCLVKGFYPSDIAVWWESYGTEWSSYKTTPPVLDSDGSFFLYSKLTVTKSEWQQGFVFSCSVMHEALHNHYTQKSLSLSPGK

SEQ ID NO: 192 - protein, 217 aa, Artificial Sequence
  Description of Artificial Sequence: Synthetic polypeptide
APELLGGPSVFLFPPKPKDTLMISRTPEVTCVVVDVSHEDPEVKFNWYVDGVEVHNAKTKPREEQYNSTYRVVSVLTVLHQDWLNGKEYKCKVSNKALPAPIEKTISKAKGQPREPQVYTLPPSRDELTKNQVSLTCLVKGFYPSDIAVEWESYGTEWSSYKTTPPVLDSDGSFFLYSKLTVTKEEWQQGFVFSCSVMHEALHNHYTQKSLSLSPGK

SEQ ID NO: 193 - protein, 217 aa, Artificial Sequence
  Description of Artificial Sequence: Synthetic polypeptide
APELLGGPSVFLFPPKPKDTLMISRTPEVTCVVVDVSHEDPEVKFNWYVDGVEVHNAKTKPREEQYNSTYRVVSVLTVLHQDWLNGKEYKCKVSNKALPAPIEKTISKAKGQPREPQVYTLPPSRDELTKNQVSLTCLVKGFYPSDIAVWWESYGTEWSSYKTTPPVLDSDGSFFLYSKLTVTKEEWQQGFVFSCSVMHEALHNHYTQKSLSLSPGK

SEQ ID NO: 194 - protein, 217 aa, Artificial Sequence
  Description of Artificial Sequence: Synthetic polypeptide
APELLGGPSVFLFPPKPKDTLMISRTPEVTCVVVDVSHEDPEVKFNWYVDGVEVHNAKTKPREEQYNSTYRVVSVLTVLHQDWLNGKEYKCKVSNKALPAPIEKTISKAKGQPREPQVYTLPPSRDELTKNQVSLTCLVKGFYPSDIAVWWESYGTEWSNYKTTPPVLDSDGSFFLYSKLTVTKSEWQQGFVFSCSVMHEALHNHYTQKSLSLSPGK

SEQ ID NO: 195 - protein, 217 aa, Artificial Sequence
  Description of Artificial Sequence: Synthetic polypeptide
APELLGGPSVFLFPPKPKDTLMISRTPEVTCVVVDVSHEDPEVKFNWYVDGVEVHNAKTKPREEQYNSTYRVVSVLTVLHQDWLNGKEYKCKVSNKALPAPIEKTISKAKGQPREPQVYTLPPSRDELTKNQVSLTCLVKGFYPSDIAVWWESYGTEWSNYKTTPPVLDSDGSFFLYSKLTVTKEEWQQGFVFSCSVMHEALHNHYTQKSLSLSPGK

SEQ ID NO: 196 - protein, 7 aa, Unknown
  Description of Unknown: Motif sequence
  MOD_RES (2)..(2): Any amino acid
YXTEWSS

SEQ ID NO: 197 - protein, 9 aa, Unknown
  Description of Unknown: Motif sequence
  MOD_RES (2)..(3): Any amino acid
  MOD_RES (5)..(8): Any amino acid
TXXEXXXXF

SEQ ID NO: 198 - protein, 217 aa, Artificial Sequence
  Description of Artificial Sequence: Synthetic polypeptide
APELLGGPSVFLFPPKPKDTLMISRTPEVTCVVVDVSHEDPEVKFNWYVDGVEVHNAKTKPREEQYNSTYRVVSVLTVLHQDWLNGKEYKCKVSNKALPAPIEKTISKAKGQPREPQVYTLPPSRDELTKNQVSLTCLVKGFYPSDIAVLWESYGTEWSSYKTTPPVLDSDGSFFLYSKLTVTKSEWQQGFVFSCSVMHEALHNHYTQKSLSLSPGK

SEQ ID NO: 199 - protein, 217 aa, Artificial Sequence
  Description of Artificial Sequence: Synthetic polypeptide
APELLGGPSVFLFPPKPKDTLMISRTPEVTCVVVDVSHEDPEVKFNWYVDGVEVHNAKTKPREEQYNSTYRVVSVLTVLHQDWLNGKEYKCKVSNKALPAPIEKTISKAKGQPREPQVYTLPPSRDELTKNQVSLTCLVKGFYPSDIAVLWESYGTEWSSYRTTPPVLDSDGSFFLYSKLTVTKSEWQQGFVFSCSVMHEALHNHYTQKSLSLSPGK

SEQ ID NO: 200 - protein, 217 aa, Artificial Sequence
  Description of Artificial Sequence: Synthetic polypeptide
APELLGGPSVFLFPPKPKDTLMISRTPEVTCVVVDVSHEDPEVKFNWYVDGVEVHNAKTKPREEQYNSTYRVVSVLTVLHQDWLNGKEYKCKVSNKALPAPIEKTISKAKGQPREPQVYTLPPSRDELTKNQVSLTCLVKGFYPSDIAVLWESYGTEWSSYRTTPPVLDSDGSFFLYSKLTVTREEWQQGFVFSCSVMHEALHNHYTQKSLSLSPGK

SEQ ID NO: 201 - protein, 217 aa, Artificial Sequence
  Description of Artificial Sequence: Synthetic polypeptide
APELLGGPSVFLFPPKPKDTLMISRTPEVTCVVVDVSHEDPEVKFNWYVDGVEVHNAKTKPREEQYNSTYRVVSVLTVLHQDWLNGKEYKCKVSNKALPAPIEKTISKAKGQPREPQVYTLPPSRDELTKNQVSLTCLVKGFYPSDIAVLWESYGTEWSSYRTTPPVLDSDGSFFLYSKLTVTGEEWQQGFVFSCSVMHEALHNHYTQKSLSLSPGK

SEQ ID NO: 202 - protein, 217 aa, Artificial Sequence
  Description of Artificial Sequence: Synthetic polypeptide
APELLGGPSVFLFPPKPKDTLMISRTPEVTCVVVDVSHEDPEVKFNWYVDGVEVHNAKTKPREEQYNSTYRVVSVLTVLHQDWLNGKEYKCKVSNKALPAPIEKTISKAKGQPREPQVYTLPPSRDELTKNQVSLTCLVKGFYPSDIAVLWESYGTEWSSYRTTPPVLDSDGSFFLYSKLTVTREEWQQGFVFSCWVMHEALHNHYTQKSLSLSPGK

SEQ ID NO: 203 - protein, 217 aa, Artificial Sequence
  Description of Artificial Sequence: Synthetic polypeptide
APELLGGPSVFLFPPKPKDTLMISRTPEVTCVVVDVSHEDPEVKFNWYVDGVEVHNAKTKPREEQYNSTYRVVSVLTVLHQDWLNGKEYKCKVSNKALPAPIEKTISKAKGQPREPQVYTLPPSRDELTKNQVSLTCLVKGFYPSDIAVLWESYGTEWSSYRTTPPVLDSDGSFFLYSKLTVTKEEWQQGFVFSCWVMHEALHNHYTQKSLSLSPGK

SEQ ID NO: 204 - protein, 217 aa, Artificial Sequence
  Description of Artificial Sequence: Synthetic polypeptide
APELLGGPSVFLFPPKPKDTLMISRTPEVTCVVVDVSHEDPEVKFNWYVDGVEVHNAKTKPREEQYNSTYRVVSVLTVLHQDWLNGKEYKCKVSNKALPAPIEKTISKAKGQPREPQVYTLPPSRDELTKNQVSLTCLVKGFYPSDIAVLWESYGTEWSSYRTTPPVLDSDGSFFLYSKLTVTREEWQQGFVFTCWVMHEALHNHYTQKSLSLSPGK

SEQ ID NO: 205 - protein, 217 aa, Artificial Sequence
  Description of Artificial Sequence: Synthetic polypeptide
APELLGGPSVFLFPPKPKDTLMISRTPEVTCVVVDVSHEDPEVKFNWYVDGVEVHNAKTKPREEQYNSTYRVVSVLTVLHQDWLNGKEYKCKVSNKALPAPIEKTISKAKGQPREPQVYTLPPSRDELTKNQVSLTCLVKGFYPSDIAVLWESYGTEWSSYRTTPPVLDSDGSFFLYSKLTVTREEWQQGFVFTCGVMHEALHNHYTQKSLSLSPGK

SEQ ID NO: 206 - protein, 217 aa, Artificial Sequence
  Description of Artificial Sequence: Synthetic polypeptide
APELLGGPSVFLFPPKPKDTLMISRTPEVTCVVVDVSHEDPEVKFNWYVDGVEVHNAKTKPREEQYNSTYRVVSVLTVLHQDWLNGKEYKCKVSNKALPAPIEKTISKAKGQPREPQVYTLPPSRDELTKNQVSLTCLVKGFYPSDIAVLWESYGTEWSSYRTTPPVLDSDGSFFLYSKLTVTREEWQQGFVFECWVMHEALHNHYTQKSLSLSPGK

SEQ ID NO: 207 - protein, 217 aa, Artificial Sequence
  Description of Artificial Sequence: Synthetic polypeptide
APELLGGPSVFLFPPKPKDTLMISRTPEVTCVVVDVSHEDPEVKFNWYVDGVEVHNAKTKPREEQYNSTYRVVSVLTVLHQDWLNGKEYKCKVSNKALPAPIEKTISKAKGQPREPQVYTLPPSRDELTKNQVSLTCLVKGFYPSDIAVLWESYGTEWSSYRTTPPVLDSDGSFFLYSKLTVTREEWQQGFVFKCWVMHEALHNHYTQKSLSLSPGK

SEQ ID NO: 208 - protein, 217 aa, Artificial Sequence
  Description of Artificial Sequence: Synthetic polypeptide
APELLGGPSVFLFPPKPKDTLMISRTPEVTCVVVDVSHEDPEVKFNWYVDGVEVHNAKTKPREEQYNSTYRVVSVLTVLHQDWLNGKEYKCKVSNKALPAPIEKTISKAKGQPREPQVYTLPPSRDELTKNQVSLTCLVKGFYPSDIAVLWESYGTEWSSYRTTPPVLDSDGSFFLYSKLTVTPEEWQQGFVFKCWVMHEALHNHYTQKSLSLSPGK

SEQ ID NO: 209 - protein, 217 aa, Artificial Sequence
  Description of Artificial Sequence: Synthetic polypeptide
APELLGGPSVFLFPPKPKDTLMISRTPEVTCVVVDVSHEDPEVKFNWYVDGVEVHNAKTKPREEQYNSTYRVVSVLTVLHQDWLNGKEYKCKVSNKALPAPIEKTISKAKGQPREPQVYTLPPSRDELTKNQVSLTCLVKGFYPSDIAVWWESYGTEWSSYRTTPPVLDSDGSFFLYSKLTVTREEWQQGFVFSCSVMHEALHNHYTQKSLSLSPGK

SEQ ID NO: 210 - protein, 217 aa, Artificial Sequence
  Description of Artificial Sequence: Synthetic polypeptide
APELLGGPSVFLFPPKPKDTLMISRTPEVTCVVVDVSHEDPEVKFNWYVDGVEVHNAKTKPREEQYNSTYRVVSVLTVLHQDWLNGKEYKCKVSNKALPAPIEKTISKAKGQPREPQVYTLPPSRDELTKNQVSLTCLVKGFYPSDIAVWWESYGTEWSSYRTTPPVLDSDGSFFLYSKLTVTGEEWQQGFVFSCSVMHEALHNHYTQKSLSLSPGK

SEQ ID NO: 211 - protein, 217 aa, Artificial Sequence
  Description of Artificial Sequence: Synthetic polypeptide
APELLGGPSVFLFPPKPKDTLMISRTPEVTCVVVDVSHEDPEVKFNWYVDGVEVHNAKTKPREEQYNSTYRVVSVLTVLHQDWLNGKEYKCKVSNKALPAPIEKTISKAKGQPREPQVYTLPPSRDELTKNQVSLTCLVKGFYPSDIAVWWESYGTEWSSYRTTPPVLDSDGSFFLYSKLTVTREEWQQGFVFTCWVMHEALHNHYTQKSLSLSPGK

SEQ ID NO: 212 - protein, 217 aa, Artificial Sequence
  Description of Artificial Sequence: Synthetic polypeptide
APELLGGPSVFLFPPKPKDTLMISRTPEVTCVVVDVSHEDPEVKFNWYVDGVEVHNAKTKPREEQYNSTYRVVSVLTVLHQDWLNGKEYKCKVSNKALPAPIEKTISKAKGQPREPQVYTLPPSRDELTKNQVSLTCLVKGFYPSDIAVWWESYGTEWSSYRTTPPVLDSDGSFFLYSKLTVTGEEWQQGFVFTCWVMHEALHNHYTQKSLSLSPGK

SEQ ID NO: 213 - protein, 217 aa, Artificial Sequence
  Description of Artificial Sequence: Synthetic polypeptide
APELLGGPSVFLFPPKPKDTLMISRTPEVTCVVVDVSHEDPEVKFNWYVDGVEVHNAKTKPREEQYNSTYRVVSVLTVLHQDWLNGKEYKCKVSNKALPAPIEKTISKAKGQPREPQVYTLPPSRDELTKNQVSLTCLVKGFYPSDIAVWWESYGTEWSSYRTTPPVLDSDGSFFLYSKLTVTREEWQQGFVFTCGVMHEALHNHYTQKSLSLSPGK

SEQ ID NO: 214 - protein, 217 aa, Artificial Sequence
  Description of Artificial Sequence: Synthetic polypeptide
APELLGGPSVFLFPPKPKDTLMISRTPEVTCVVVDVSHEDPEVKFNWYVDGVEVHNAKTKPREEQYNSTYRVVSVLTVLHQDWLNGKEYKCKVSNKALPAPIEKTISKAKGQPREPQVYTLPPSRDELTKNQVSLTCLVKGFYPSDIAVLWESYGTEWSSYKTTPPVLDSDGSFFLYSKLTVTKEEWQQGFVFSCSVMHEALHNHYTQKSLSLSPGK

SEQ ID NO: 215 - protein, 217 aa, Artificial Sequence
  Description of Artificial Sequence: Synthetic polypeptide
APELLGGPSVFLFPPKPKDTLMISRTPEVTCVVVDVSHEDPEVKFNWYVDGVEVHNAKTKPREEQYNSTYRVVSVLTVLHQDWLNGKEYKCKVSNKALPAPIEKTISKAKGQPREPQVYTLPPSRDELTKNQVSLTCLVKGFYPSDIAVLWESYGTEWSSYRTTPPVLDSDGSFFLYSKLTVTKEEWQQGFVFSCSVMHEALHNHYTQKSLSLSPGK

SEQ ID NO: 216 - protein, 217 aa, Artificial Sequence
  Description of Artificial Sequence: Synthetic polypeptide
APELLGGPSVFLFPPKPKDTLMISRTPEVTCVVVDVSHEDPEVKFNWYVDGVEVHNAKTKPREEQYNSTYRVVSVLTVLHQDWLNGKEYKCKVSNKALPAPIEKTISKAKGQPREPQVYTLPPSRDELTKNQVSLTCLVKGFYPSDIAVEWESFGTEWSSYKTTPPVLDSDGSFFLYSKLTVTKEEWQQGFVFSCSVMHEALHNHYTQKSLSLSPGK

SEQ ID NO: 217 - protein, 217 aa, Artificial Sequence
  Description of Artificial Sequence: Synthetic polypeptide
APELLGGPSVFLFPPKPKDTLMISRTPEVTCVVVDVSHEDPEVKFNWYVDGVEVHNAKTKPREEQYNSTYRVVSVLTVLHQDWLNGKEYKCKVSNKALPAPIEKTISKAKGQPREPQVYTLPPSRDELTKNQVSLTCLVKGFYPSDIAVEWESYGTEWASYKTTPPVLDSDGSFFLYSKLTVTKEEWQQGFVFSCSVMHEALHNHYTQKSLSLSPGK

SEQ ID NO: 218 - protein, 217 aa, Artificial Sequence
  Description of Artificial Sequence: Synthetic polypeptide
APELLGGPSVFLFPPKPKDTLMISRTPEVTCVVVDVSHEDPEVKFNWYVDGVEVHNAKTKPREEQYNSTYRVVSVLTVLHQDWLNGKEYKCKVSNKALPAPIEKTISKAKGQPREPQVYTLPPSRDELTKNQVSLTCLVKGFYPSDIAVEWESYGTEWVSYKTTPPVLDSDGSFFLYSKLTVTKEEWQQGFVFSCSVMHEALHNHYTQKSLSLSPGK

SEQ ID NO: 219 - protein, 217 aa, Artificial Sequence
  Description of Artificial Sequence: Synthetic polypeptide
APELLGGPSVFLFPPKPKDTLMISRTPEVTCVVVDVSHEDPEVKFNWYVDGVEVHNAKTKPREEQYNSTYRVVSVLTVLHQDWLNGKEYKCKVSNKALPAPIEKTISKAKGQPREPQVYTLPPSRDELTKNQVSLTCLVKGFYPSDIAVEWESYGTEWSSYKTTPPVLDSDGSFFLYSKLTVSKEEWQQGFVFSCSVMHEALHNHYTQKSLSLSPGK

SEQ ID NO: 220 - protein, 217 aa, Artificial Sequence
  Description of Artificial Sequence: Synthetic polypeptide
APELLGGPSVFLFPPKPKDTLMISRTPEVTCVVVDVSHEDPEVKFNWYVDGVEVHNAKTKPREEQYNSTYRVVSVLTVLHQDWLNGKEYKCKVSNKALPAPIEKTISKAKGQPREPQVYTLPPSRDELTKNQVSLTCLVKGFYPSDIAVEWESFGTEWASYKTTPPVLDSDGSFFLYSKLTVTKEEWQQGFVFSCSVMHEALHNHYTQKSLSLSPGK

SEQ ID NO: 221 - protein, 217 aa, Artificial Sequence
  Description of Artificial Sequence: Synthetic polypeptide
APELLGGPSVFLFPPKPKDTLMISRTPEVTCVVVDVSHEDPEVKFNWYVDGVEVHNAKTKPREEQYNSTYRVVSVLTVLHQDWLNGKEYKCKVSNKALPAPIEKTISKAKGQPREPQVYTLPPSRDELTKNQVSLTCLVKGFYPSDIAVEWESFGTEWVSYKTTPPVLDSDGSFFLYSKLTVTKEEWQQGFVFSCSVMHEALHNHYTQKSLSLSPGK

SEQ ID NO: 222 - protein, 217 aa, Artificial Sequence
  Description of Artificial Sequence: Synthetic polypeptide
APELLGGPSVFLFPPKPKDTLMISRTPEVTCVVVDVSHEDPEVKFNWYVDGVEVHNAKTKPREEQYNSTYRVVSVLTVLHQDWLNGKEYKCKVSNKALPAPIEKTISKAKGQPREPQVYTLPPSRDELTKNQVSLTCLVKGFYPSDIAVWWESFGTEWSSYKTTPPVLDSDGSFFLYSKLTVTKEEWQQGFVFSCSVMHEALHNHYTQKSLSLSPGK

SEQ ID NO: 223 - protein, 217 aa, Artificial Sequence
  Description of Artificial Sequence: Synthetic polypeptide
APELLGGPSVFLFPPKPKDTLMISRTPEVTCVVVDVSHEDPEVKFNWYVDGVEVHNAKTKPREEQYNSTYRVVSVLTVLHQDWLNGKEYKCKVSNKALPAPIEKTISKAKGQPREPQVYTLPPSRDELTKNQVSLTCLVKGFYPSDIAVWWESYGTEWASYKTTPPVLDSDGSFFLYSKLTVTKEEWQQGFVFSCSVMHEALHNHYTQKSLSLSPGK

SEQ ID NO: 224 - protein, 217 aa, Artificial Sequence
  Description of Artificial Sequence: Synthetic polypeptide
APELLGGPSVFLFPPKPKDTLMISRTPEVTCVVVDVSHEDPEVKFNWYVDGVEVHNAKTKPREEQYNSTYRVVSVLTVLHQDWLNGKEYKCKVSNKALPAPIEKTISKAKGQPREPQVYTLPPSRDELTKNQVSLTCLVKGFYPSDIAVWWESYGTEWVSYKTTPPVLDSDGSFFLYSKLTVTKEEWQQGFVFSCSVMHEALHNHYTQKSLSLSPGK

SEQ ID NO: 225 - protein, 217 aa, Artificial Sequence
  Description of Artificial Sequence: Synthetic polypeptide
APELLGGPSVFLFPPKPKDTLMISRTPEVTCVVVDVSHEDPEVKFNWYVDGVEVHNAKTKPREEQYNSTYRVVSVLTVLHQDWLNGKEYKCKVSNKALPAPIEKTISKAKGQPREPQVYTLPPSRDELTKNQVSLTCLVKGFYPSDIAVWWESYGTEWSSYKTTPPVLDSDGSFFLYSKLTVSKEEWQQGFVFSCSVMHEALHNHYTQKSLSLSPGK

SEQ ID NO: 226 - protein, 217 aa, Artificial Sequence
  Description of Artificial Sequence: Synthetic polypeptide
APELLGGPSVFLFPPKPKDTLMISRTPEVTCVVVDVSHEDPEVKFNWYVDGVEVHNAKTKPREEQYNSTYRVVSVLTVLHQDWLNGKEYKCKVSNKALPAPIEKTISKAKGQPREPQVYTLPPSRDELTKNQVSLTCLVKGFYPSDIAVWWESFGTEWASYKTTPPVLDSDGSFFLYSKLTVTKEEWQQGFVFSCSVMHEALHNHYTQKSLSLSPGK

SEQ ID NO: 227 - protein, 217 aa, Artificial Sequence
  Description of Artificial Sequence: Synthetic polypeptide
APELLGGPSVFLFPPKPKDTLMISRTPEVTCVVVDVSHEDPEVKFNWYVDGVEVHNAKTKPREEQYNSTYRVVSVLTVLHQDWLNGKEYKCKVSNKALPAPIEKTISKAKGQPREPQVYTLPPSRDELTKNQVSLTCLVKGFYPSDIAVWWESFGTEWVSYKTTPPVLDSDGSFFLYSKLTVTKEEWQQGFVFSCSVMHEALHNHYTQKSLSLSPGK

SEQ ID NO: 228 - protein, 217 aa, Artificial Sequence
  Description of Artificial Sequence: Synthetic polypeptide
APELLGGPSVFLFPPKPKDTLMISRTPEVTCVVVDVSHEDPEVKFNWYVDGVEVHNAKTKPREEQYNSTYRVVSVLTVLHQDWLNGKEYKCKVSNKALPAPIEKTISKAKGQPREPQVYTLPPSRDELTKNQVSLTCLVKGFYPSDIAVEWESFGTEWSNYKTTPPVLDSDGSFFLYSKLTVTKEEWQQGFVFSCSVMHEALHNHYTQKSLSLSPGK

SEQ ID NO: 229 - protein, 217 aa, Artificial Sequence
  Description of Artificial Sequence: Synthetic polypeptide
APELLGGPSVFLFPPKPKDTLMISRTPEVTCVVVDVSHEDPEVKFNWYVDGVEVHNAKTKPREEQYNSTYRVVSVLTVLHQDWLNGKEYKCKVSNKALPAPIEKTISKAKGQPREPQVYTLPPSRDELTKNQVSLTCLVKGFYPSDIAVEWESYGTEWANYKTTPPVLDSDGSFFLYSKLTVTKEEWQQGFVFSCSVMHEALHNHYTQKSLSLSPGK

SEQ ID NO: 230 - protein, 217 aa, Artificial Sequence
  Description of Artificial Sequence: Synthetic polypeptide
APELLGGPSVFLFPPKPKDTLMISRTPEVTCVVVDVSHEDPEVKFNWYVDGVEVHNAKTKPREEQYNSTYRVVSVLTVLHQDWLNGKEYKCKVSNKALPAPIEKTISKAKGQPREPQVYTLPPSRDELTKNQVSLTCLVKGFYPSDIAVEWESFGTEWANYKTTPPVLDSDGSFFLYSKLTVTKEEWQQGFVFSCSVMHEALHNHYTQKSLSLSPGK

SEQ ID NO: 231 - protein, 217 aa, Artificial Sequence
  Description of Artificial Sequence: Synthetic polypeptide
APELLGGPSVFLFPPKPKDTLMISRTPEVTCVVVDVSHEDPEVKFNWYVDGVEVHNAKTKPREEQYNSTYRVVSVLTVLHQDWLNGKEYKCKVSNKALPAPIEKTISKAKGQPREPQVYTLPPSRDELTKNQVSLTCLVKGFYPSDIAVEWESFGTEWVNYKTTPPVLDSDGSFFLYSKLTVTKEEWQQGFVFSCSVMHEALHNHYTQKSLSLSPGK

SEQ ID NO: 232 - protein, 217 aa, Artificial Sequence
  Description of Artificial Sequence: Synthetic polypeptide
APELLGGPSVFLFPPKPKDTLMISRTPEVTCVVVDVSHEDPEVKFNWYVDGVEVHNAKTKPREEQYNSTYRVVSVLTVLHQDWLNGKEYKCKVSNKALPAPIEKTISKAKGQPREPQVYTLPPSRDELTKNQVSLTCLVKGFYPSDIAVWWESFGTEWSNYKTTPPVLDSDGSFFLYSKLTVTKEEWQQGFVFSCSVMHEALHNHYTQKSLSLSPGK

SEQ ID NO: 233 - protein, 217 aa, Artificial Sequence
  Description of Artificial Sequence: Synthetic polypeptide
APELLGGPSVFLFPPKPKDTLMISRTPEVTCVVVDVSHEDPEVKFNWYVDGVEVHNAKTKPREEQYNSTYRVVSVLTVLHQDWLNGKEYKCKVSNKALPAPIEKTISKAKGQPREPQVYTLPPSRDELTKNQVSLTCLVKGFYPSDIAVWWESYGTEWANYKTTPPVLDSDGSFFLYSKLTVTKEEWQQGFVFSCSVMHEALHNHYTQKSLSLSPGK

SEQ ID NO: 234 - protein, 217 aa, Artificial Sequence
  Description of Artificial Sequence: Synthetic polypeptide
APELLGGPSVFLFPPKPKDTLMISRTPEVTCVVVDVSHEDPEVKFNWYVDGVEVHNAKTKPREEQYNSTYRVVSVLTVLHQDWLNGKEYKCKVSNKALPAPIEKTISKAKGQPREPQVYTLPPSRDELTKNQVSLTCLVKGFYPSDIAVWWESYGTEWVNYKTTPPVLDSDGSFFLYSKLTVTKEEWQQGFVFSCSVMHEALHNHYTQKSLSLSPGK

SEQ ID NO: 235 - protein, 217 aa, Artificial Sequence
  Description of Artificial Sequence: Synthetic polypeptide
APELLGGPSVFLFPPKPKDTLMISRTPEVTCVVVDVSHEDPEVKFNWYVDGVEVHNAKTKPREEQYNSTYRVVSVLTVLHQDWLNGKEYKCKVSNKALPAPIEKTISKAKGQPREPQVYTLPPSRDELTKNQVSLTCLVKGFYPSDIAVWWESYGTEWSNYKTTPPVLDSDGSFFLYSKLTVSKEEWQQGFVFSCSVMHEALHNHYTQKSLSLSPGK

SEQ ID NO: 236 - protein, 217 aa, Artificial Sequence
  Description of Artificial Sequence: Synthetic polypeptide
APELLGGPSVFLFPPKPKDTLMISRTPEVTCVVVDVSHEDPEVKFNWYVDGVEVHNAKTKPREEQYNSTYRVVSVLTVLHQDWLNGKEYKCKVSNKALPAPIEKTISKAKGQPREPQVYTLPPSRDELTKNQVSLTCLVKGFYPSDIAVWWESFGTEWANYKTTPPVLDSDGSFFLYSKLTVTKEEWQQGFVFSCSVMHEALHNHYTQKSLSLSPGK

SEQ ID NO: 237 - protein, 217 aa, Artificial Sequence
  Description of Artificial Sequence: Synthetic polypeptide
APELLGGPSVFLFPPKPKDTLMISRTPEVTCVVVDVSHEDPEVKFNWYVDGVEVHNAKTKPREEQYNSTYRVVSVLTVLHQDWLNGKEYKCKVSNKALPAPIEKTISKAKGQPREPQVYTLPPSRDELTKNQVSLTCLVKGFYPSDIAVWWESFGTEWVNYKTTPPVLDSDGSFFLYSKLTVTKEEWQQGFVFSCSVMHEALHNHYTQKSLSLSPGK

SEQ ID NO: 238 - protein, 217 aa, Artificial Sequence
  Description of Artificial Sequence: Synthetic polypeptide
APELLGGPSVFLFPPKPKDTLMISRTPEVTCVVVDVSHEDPEVKFNWYVDGVEVHNAKTKPREEQYNSTYRVVSVLTVLHQDWLNGKEYKCKVSNKALPAPIEKTISKAKGQPREPQVYTLPPSRDELTKNQVSLTCLVKGFYPSDIAVLWESFGTEWSSYKTTPPVLDSDGSFFLYSKLTVTKEEWQQGFVFSCSVMHEALHNHYTQKSLSLSPGK

SEQ ID NO: 239 - protein, 217 aa, Artificial Sequence
  Description of Artificial Sequence: Synthetic polypeptide
APELLGGPSVFLFPPKPKDTLMISRTPEVTCVVVDVSHEDPEVKFNWYVDGVEVHNAKTKPREEQYNSTYRVVSVLTVLHQDWLNGKEYKCKVSNKALPAPIEKTISKAKGQPREPQVYTLPPSRDELTKNQVSLTCLVKGFYPSDIAVLWESYGTEWASYKTTPPVLDSDGSFFLYSKLTVTKEEWQQGFVFSCSVMHEALHNHYTQKSLSLSPGK

SEQ ID NO: 240 - protein, 217 aa, Artificial Sequence
  Description of Artificial Sequence: Synthetic polypeptide
APELLGGPSVFLFPPKPKDTLMISRTPEVTCVVVDVSHEDPEVKFNWYVDGVEVHNAKTKPREEQYNSTYRVVSVLTVLHQDWLNGKEYKCKVSNKALPAPIEKTISKAKGQPREPQVYTLPPSRDELTKNQVSLTCLVKGFYPSDIAVLWESYGTEWVSYKTTPPVLDSDGSFFLYSKLTVTKEEWQQGFVFSCSVMHEALHNHYTQKSLSLSPGK

SEQ ID NO: 241 - protein, 217 aa, Artificial Sequence
  Description of Artificial Sequence: Synthetic polypeptide
APELLGGPSVFLFPPKPKDTLMISRTPEVTCVVVDVSHEDPEVKFNWYVDGVEVHNAKTKPREEQYNSTYRVVSVLTVLHQDWLNGKEYKCKVSNKALPAPIEKTISKAKGQPREPQVYTLPPSRDELTKNQVSLTCLVKGFYPSDIAVLWESYGTEWSSYKTTPPVLDSDGSFFLYSKLTVSKEEWQQGFVFSCSVMHEALHNHYTQKSLSLSPGK

SEQ ID NO: 242 - protein, 217 aa, Artificial Sequence
  Description of Artificial Sequence: Synthetic polypeptide
APELLGGPSVFLFPPKPKDTLMISRTPEVTCVVVDVSHEDPEVKFNWYVDGVEVHNAKTKPREEQYNSTYRVVSVLTVLHQDWLNGKEYKCKVSNKALPAPIEKTISKAKGQPREPQVYTLPPSRDELTKNQVSLTCLVKGFYPSDIAVLWESFGTEWASYKTTPPVLDSDGSFFLYSKLTVTKEEWQQGFVFSCSVMHEALHNHYTQKSLSLSPGK

SEQ ID NO: 243 - protein, 217 aa, Artificial Sequence
  Description of Artificial Sequence: Synthetic polypeptide
APELLGGPSVFLFPPKPKDTLMISRTPEVTCVVVDVSHEDPEVKFNWYVDGVEVHNAKTKPREEQYNSTYRVVSVLTVLHQDWLNGKEYKCKVSNKALPAPIEKTISKAKGQPREPQVYTLPPSRDELTKNQVSLTCLVKGFYPSDIAVLWESFGTEWVSYKTTPPVLDSDGSFFLYSKLTVTKEEWQQGFVFSCSVMHEALHNHYTQKSLSLSPGK

SEQ ID NO: 244 - protein, 217 aa, Artificial Sequence
  Description of Artificial Sequence: Synthetic polypeptide
APELLGGPSVFLFPPKPKDTLMISRTPEVTCVVVDVSHEDPEVKFNWYVDGVEVHNAKTKPREEQYNSTYRVVSVLTVLHQDWLNGKEYKCKVSNKALPAPIEKTISKAKGQPREPQVYTLPPSRDELTKNQVSLTCLVKGFYPSDIAVEWESYGTEWSNYKTTPPVLDSDGSFFLYSKLTVTKSEWQQGFVFSCSVMHEALHNHYTQKSLSLSPGK

SEQ ID NO: 245 - protein, 217 aa, Artificial Sequence
  Description of Artificial Sequence: Synthetic polypeptide
APELLGGPSVFLFPPKPKDTLMISRTPEVTCVVVDVSHEDPEVKFNWYVDGVEVHNAKTKPREEQYNSTYRVVSVLTVLHQDWLNGKEYKCKVSNKALPAPIEKTISKAKGQPREPQVYTLPPSRDELTKNQVSLTCLVKGFYPSDIAVEWESFGTEWSSYKTTPPVLDSDGSFFLYSKLTVSKEEWQQGFVFSCSVMHEALHNHYTQKSLSLSPGK

SEQ ID NO: 246 - protein, 217 aa, Artificial Sequence
  Description of Artificial Sequence: Synthetic polypeptide
APELLGGPSVFLFPPKPKDTLMISRTPEVTCVVVDVSHEDPEVKFNWYVDGVEVHNAKTKPREEQYNSTYRVVSVLTVLHQDWLNGKEYKCKVSNKALPAPIEKTISKAKGQPREPQVYTLPPSRDELTKNQVSLTCLVKGFYPSDIAVEWESYGTEWANYKTTPPVLDSDGSFFLYSKLTVSKSEWQQGFVFSCSVMHEALHNHYTQKSLSLSPGK

SEQ ID NO: 247 - protein, 217 aa, Artificial Sequence
  Description of Artificial Sequence: Synthetic polypeptide
APELLGGPSVFLFPPKPKDTLMISRTPEVTCVVVDVSHEDPEVKFNWYVDGVEVHNAKTKPREEQYNSTYRVVSVLTVLHQDWLNGKEYKCKVSNKALPAPIEKTISKAKGQPREPQVYTLPPSRDELTKNQVSLTCLVKGFYPSDIAVEWESYGTEWSSYKTTPPVLDSDGSFFLYSKLTVSKSEWQQGFVFSCSVMHEALHNHYTQKSLSLSPGK

SEQ ID NO: 248 - protein, 217 aa, Artificial Sequence
  Description of Artificial Sequence: Synthetic polypeptide
APELLGGPSVFLFPPKPKDTLMISRTPEVTCVVVDVSHEDPEVKFNWYVDGVEVHNAKTKPREEQYNSTYRVVSVLTVLHQDWLNGKEYKCKVSNKALPAPIEKTISKAKGQPREPQVYTLPPSRDELTKNQVSLTCLVKGFYPSDIAVEWESYGTEWVNYKTTPPVLDSDGSFFLYSKLTVSKEEWQQGFVFSCSVMHEALHNHYTQKSLSLSPGK

SEQ ID NO: 249 - protein, 217 aa, Artificial Sequence
  Description of Artificial Sequence: Synthetic polypeptide
APELLGGPSVFLFPPKPKDTLMISRTPEVTCVVVDVSHEDPEVKFNWYVDGVEVHNAKTKPREEQYNSTYRVVSVLTVLHQDWLNGKEYKCKVSNKALPAPIEKTISKAKGQPREPQVYTLPPSRDELTKNQVSLTCLVKGFYPSDIAVEWESFGTEWVNYKTTPPVLDSDGSFFLYSKLTVSKEEWQQGFVFSCSVMHEALHNHYTQKSLSLSPGK

SEQ ID NO: 250 - protein, 10 aa, Artificial Sequence
  Description of Artificial Sequence: Synthetic peptide
GYSFTGYWMN

SEQ ID NO: 251 - protein, 17 aa, Artificial Sequence
  Description of Artificial Sequence: Synthetic peptide
MIHPSDSEIRANQKFRD

SEQ ID NO: 252 - protein, 11 aa, Artificial Sequence
  Description of Artificial Sequence: Synthetic peptide
ARGTYDGGFEY

SEQ ID NO: 253 - protein, 15 aa, Artificial Sequence
  Description of Artificial Sequence: Synthetic peptide
RASQSVSGSRFTYMH

SEQ ID NO: 254 - protein, 7 aa, Artificial Sequence
  Description of Artificial Sequence: Synthetic peptide
YASILES

SEQ ID NO: 255 - protein, 8 aa, Artificial Sequence
  Description of Artificial Sequence: Synthetic peptide
QHSWEIPP

SEQ ID NO: 256 - protein, 118 aa, Artificial Sequence
  Description of Artificial Sequence: Synthetic polypeptide
QVQLQQPGAELVRPGASVKLSCKASGYSFTGYWMNWLKQRPGQGLEWIGMIHPSDSEIRANQKFRDKATLTVDKSSTTAYMQLSSPTSEDSAVYYCARGTYDGGFEYWGQGTTLTVSS

SEQ ID NO: 257 - protein, 112 aa, Artificial Sequence
  Description of Artificial Sequence: Synthetic polypeptide
DIVLTQSPASLVVSLGQRATISCRASQSVSGSRFTYMHWYQQKPGQPPKLLIKYASILESGVPARFSGGGSGTDFTLNIHPVEEDDTATYYCQHSWEIPPWTFGGGTKLEIK

SEQ ID NO: 258 - protein, 448 aa, Artificial Sequence
  Description of Artificial Sequence: Synthetic polypeptide
QVQLQQPGAELVRPGASVKLSCKASGYSFTGYWMNWLKQRPGQGLEWIGMIHPSDSEIRANQKFRDKATLTVDKSSTTAYMQLSSPTSEDSAVYYCARGTYDGGFEYWGQGTTLTVSSASTKGPSVFPLAPSSKSTSGGTAALGCLVKDYFPEPVTVSWNSGALTSGVHTFPAVLQSSGLYSLSSVVTVPSSSLGTQTYICNVNHKPSNTKVDKKVEPKSCDKTHTCPPCPAPELLGGPSVFLFPPKPKDTLMISRTPEVTCVVVDVSHEDPEVKFNWYVDGVEVHNAKTKPREEQYNSTYRVVSVLTVLHQDWLNGKEYKCKVSNKALPAPIEKTISKAKGQPREPQVYTLPPSRDELTKNQVSLWCLVKGFYPSDIAVEWESFGTEWSNYKTTPPVLDSDGSFFLYSKLTVSKEEWQQGFVFSCSVMHEALHNHYTQKSLSLSPGK

SEQ ID NO: 259 - protein, 448 aa, Artificial Sequence
  Description of Artificial Sequence: Synthetic polypeptide
QVQLQQPGAELVRPGASVKLSCKASGYSFTGYWMNWLKQRPGQGLEWIGMIHPSDSEIRANQKFRDKATLTVDKSSTTAYMQLSSPTSEDSAVYYCARGTYDGGFEYWGQGTTLTVSSASTKGPSVFPLAPSSKSTSGGTAALGCLVKDYFPEPVTVSWNSGALTSGVHTFPAVLQSSGLYSLSSVVTVPSSSLGTQTYICNVNHKPSNTKVDKKVEPKSCDKTHTCPPCPAPEAAGGPSVFLFPPKPKDTLMISRTPEVTCVVVDVSHEDPEVKFNWYVDGVEVHNAKTKPREEQYNSTYRVVSVLTVLHQDWLNGKEYKCKVSNKALPAPIEKTISKAKGQPREPQVYTLPPSRDELTKNQVSLWCLVKGFYPSDIAVEWESFGTEWSNYKTTPPVLDSDGSFFLYSKLTVSKEEWQQGFVFSCSVMHEALHNHYTQKSLSLSPGK

SEQ ID NO: 260 - protein, 448 aa, Artificial Sequence
  Description of Artificial Sequence: Synthetic polypeptide
QVQLQQPGAELVRPGASVKLSCKASGYSFTGYWMNWLKQRPGQGLEWIGMIHPSDSEIRANQKFRDKATLTVDKSSTTAYMQLSSPTSEDSAVYYCARGTYDGGFEYWGQGTTLTVSSASTKGPSVFPLAPSSKSTSGGTAALGCLVKDYFPEPVTVSWNSGALTSGVHTFPAVLQSSGLYSLSSVVTVPSSSLGTQTYICNVNHKPSNTKVDKKVEPKSCDKTHTCPPCPAPELLGGPSVFLFPPKPKDTLMISRTPEVTCVVVDVSHEDPEVKFNWYVDGVEVHNAKTKPREEQYNSTYRVVSVLTVLHQDWLNGKEYKCKVSNKALPAPIEKTISKAKGQPREPQVYTLPPSRDELTKNQVSLWCLVKGFYPSDIAVEWESFGTEWSNYKTTPPVLDSDGSFFLYSKLTVSKEEWQQGFVFSCSVLHEALHSHYTQKSLSLSPGK

SEQ ID NO: 261 - protein, 448 aa, Artificial Sequence
  Description of Artificial Sequence: Synthetic polypeptide
QVQLQQPGAELVRPGASVKLSCKASGYSFTGYWMNWLKQRPGQGLEWIGMIHPSDSEIRANQKFRDKATLTVDKSSTTAYMQLSSPTSEDSAVYYCARGTYDGGFEYWGQGTTLTVSSASTKGPSVFPLAPSSKSTSGGTAALGCLVKDYFPEPVTVSWNSGALTSGVHTFPAVLQSSGLYSLSSVVTVPSSSLGTQTYICNVNHKPSNTKVDKKVEPKSCDKTHTCPPCPAPEAAGGPSVFLFPPKPKDTLMISRTPEVTCVVVDVSHEDPEVKFNWYVDGVEVHNAKTKPREEQYNSTYRVVSVLTVLHQDWLNGKEYKCKVSNKALPAPIEKTISKAKGQPREPQVYTLPPSRDELTKNQVSLWCLVKGFYPSDIAVEWESFGTEWSNYKTTPPVLDSDGSFFLYSKLTVSKEEWQQGFVFSCSVLHEALHSHYTQKSLSLSPGK

SEQ ID NO: 262 - protein, 448 aa, Artificial Sequence
  Description of Artificial Sequence: Synthetic polypeptide
QVQLQQPGAELVRPGASVKLSCKASGYSFTGYWMNWLKQRPGQGLEWIGMIHPSDSEIRANQKFRDKATLTVDKSSTTAYMQLSSPTSEDSAVYYCARGTYDGGFEYWGQGTTLTVSSASTKGPSVFPLAPSSKSTSGGTAALGCLVKDYFPEPVTVSWNSGALTSGVHTFPAVLQSSGLYSLSSVVTVPSSSLGTQTYICNVNHKPSNTKVDKKVEPKSCDKTHTCPPCPAPELLGGPSVFLFPPKPKDTLMISRTPEVTCVVVDVSHEDPEVKFNWYVDGVEVHNAKTKPREEQYNSTYRVVSVLTVLHQDWLNGKEYKCKVSNKALPAPIEKTISKAKGQPREPQVYTLPPSRDELTKNQVSLSCAVKGFYPSDIAVEWESFGTEWSNYKTTPPVLDSDGSFFLVSKLTVSKEEWQQGFVFSCSVMHEALHNHYTQKSLSLSPGK

SEQ ID NO: 263 - protein, 448 aa, Artificial Sequence
  Description of Artificial Sequence: Synthetic polypeptide
QVQLQQPGAELVRPGASVKLSCKASGYSFTGYWMNWLKQRPGQGLEWIGMIHPSDSEIRANQKFRDKATLTVDKSSTTAYMQLSSPTSEDSAVYYCARGTYDGGFEYWGQGTTLTVSSASTKGPSVFPLAPSSKSTSGGTAALGCLVKDYFPEPVTVSWNSGALTSGVHTFPAVLQSSGLYSLSSVVTVPSSSLGTQTYICNVNHKPSNTKVDKKVEPKSCDKTHTCPPCPAPEAAGGPSVFLFPPKPKDTLMISRTPEVTCVVVDVSHEDPEVKFNWYVDGVEVHNAKTKPREEQYNSTYRVVSVLTVLHQDWLNGKEYKCKVSNKALPAPIEKTISKAKGQPREPQVYTLPPSRDELTKNQVSLSCAVKGFYPSDIAVEWESFGTEWSNYKTTPPVLDSDGSFFLVSKLTVSKEEWQQGFVFSCSVMHEALHNHYTQKSLSLSPGK

SEQ ID NO: 264 - protein, 448 aa, Artificial Sequence
  Description of Artificial Sequence: Synthetic polypeptide
QVQLQQPGAELVRPGASVKLSCKASGYSFTGYWMNWLKQRPGQGLEWIGMIHPSDSEIRANQKFRDKATLTVDKSSTTAYMQLSSPTSEDSAVYYCARGTYDGGFEYWGQGTTLTVSSASTKGPSVFPLAPSSKSTSGGTAALGCLVKDYFPEPVTVSWNSGALTSGVHTFPAVLQSSGLYSLSSVVTVPSSSLGTQTYICNVNHKPSNTKVDKKVEPKSCDKTHTCPPCPAPELLGGPSVFLFPPKPKDTLMISRTPEVTCVVVDVSHEDPEVKFNWYVDGVEVHNAKTKPREEQYNSTYRVVSVLTVLHQDWLNGKEYKCKVSNKALPAPIEKTISKAKGQPREPQVYTLPPSRDELTKNQVSLSCAVKGFYPSDIAVEWESFGTEWSNYKTTPPVLDSDGSFFLVSKLTVSKEEWQQGFVFSCSVLHEALHSHYTQKSLSLSPGK

SEQ ID NO: 265 - protein, 448 aa, Artificial Sequence
  Description of Artificial Sequence: Synthetic polypeptide
QVQLQQPGAELVRPGASVKLSCKASGYSFTGYWMNWLKQRPGQGLEWIGMIHPSDSEIRANQKFRDKATLTVDKSSTTAYMQLSSPTSEDSAVYYCARGTYDGGFEYWGQGTTLTVSSASTKGPSVFPLAPSSKSTSGGTAALGCLVKDYFPEPVTVSWNSGALTSGVHTFPAVLQSSGLYSLSSVVTVPSSSLGTQTYICNVNHKPSNTKVDKKVEPKSCDKTHTCPPCPAPEAAGGPSVFLFPPKPKDTLMISRTPEVTCVVVDVSHEDPEVKFNWYVDGVEVHNAKTKPREEQYNSTYRVVSVLTVLHQDWLNGKEYKCKVSNKALPAPIEKTISKAKGQPREPQVYTLPPSRDELTKNQVSLSCAVKGFYPSDIAVEWESFGTEWSNYKTTPPVLDSDGSFFLVSKLTVSKEEWQQGFVFSCSVLHEALHSHYTQKSLSLSPGK

SEQ ID NO: 266 - protein, 448 aa, Artificial Sequence
  Description of Artificial Sequence: Synthetic polypeptide
QVQLQQPGAELVRPGASVKLSCKASGYSFTGYWMNWLKQRPGQGLEWIGMIHPSDSEIRANQKFRDKATLTVDKSSTTAYMQLSSPTSEDSAVYYCARGTYDGGFEYWGQGTTLTVSSASTKGPSVFPLAPSSKSTSGGTAALGCLVKDYFPEPVTVSWNSGALTSGVHTFPAVLQSSGLYSLSSVVTVPSSSLGTQTYICNVNHKPSNTKVDKKVEPKSCDKTHTCPPCPAPELLGGPSVFLFPPKPKDTLMISRTPEVTCVVVDVSHEDPEVKFNWYVDGVEVHNAKTKPREEQYNSTYRVVSVLTVLHQDWLNGKEYKCKVSNKALPAPIEKTISKAKGQPREPQVYTLPPSRDELTKNQVSLWCLVKGFYPSDIAVEWESYGTEWVNYKTTPPVLDSDGSFFLYSKLTVTKEEWQQGFVFSCSVMHEALHNHYTQKSLSLSPGK

SEQ ID NO: 267 - protein, 448 aa, Artificial Sequence
  Description of Artificial Sequence: Synthetic polypeptide
QVQLQQPGAELVRPGASVKLSCKASGYSFTGYWMNWLKQRPGQGLEWIGMIHPSDSEIRANQKFRDKATLTVDKSSTTAYMQLSSPTSEDSAVYYCARGTYDGGFEYWGQGTTLTVSSASTKGPSVFPLAPSSKSTSGGTAALGCLVKDYFPEPVTVSWNSGALTSGVHTFPAVLQSSGLYSLSSVVTVPSSSLGTQTYICNVNHKPSNTKVDKKVEPKSCDKTHTCPPCPAPEAAGGPSVFLFPPKPKDTLMISRTPEVTCVVVDVSHEDPEVKFNWYVDGVEVHNAKTKPREEQYNSTYRVVSVLTVLHQDWLNGKEYKCKVSNKALPAPIEKTISKAKGQPREPQVYTLPPSRDELTKNQVSLWCLVKGFYPSDIAVEWESYGTEWVNYKTTPPVLDSDGSFFLYSKLTVTKEEWQQGFVFSCSVMHEALHNHYTQKSLSLSPGK

SEQ ID NO: 268 - protein, 448 aa, Artificial Sequence
  Description of Artificial Sequence: Synthetic polypeptide
QVQLQQPGAELVRPGASVKLSCKASGYSFTGYWMNWLKQRPGQGLEWIGMIHPSDSEIRANQKFRDKATLTVDKSSTTAYMQLSSPTSEDSAVYYCARGTYDGGFEYWGQGTTLTVSSASTKGPSVFPLAPSSKSTSGGTAALGCLVKDYFPEPVTVSWNSGALTSGVHTFPAVLQSSGLYSLSSVVTVPSSSLGTQTYICNVNHKPSNTKVDKKVEPKSCDKTHTCPPCPAPELLGGPSVFLFPPKPKDTLMISRTPEVTCVVVDVSHEDPEVKFNWYVDGVEVHNAKTKPREEQYNSTYRVVSVLTVLHQDWLNGKEYKCKVSNKALPAPIEKTISKAKGQPREPQVYTLPPSRDELTKNQVSLWCLVKGFYPSDIAVEWESYGTEWVNYKTTPPVLDSDGSFFLYSKLTVTKEEWQQGFVFSCSVLHEALHSHYTQKSLSLSPGK

SEQ ID NO: 269 - protein, 448 aa, Artificial Sequence
  Description of Artificial Sequence: Synthetic polypeptide
QVQLQQPGAELVRPGASVKLSCKASGYSFTGYWMNWLKQRPGQGLEWIGMIHPSDSEIRANQKFRDKATLTVDKSSTTAYMQLSSPTSEDSAVYYCARGTYDGGFEYWGQGTTLTVSSASTKGPSVFPLAPSSKSTSGGTAALGCLVKDYFPEPVTVSWNSGALTSGVHTFPAVLQSSGLYSLSSVVTVPSSSLGTQTYICNVNHKPSNTKVDKKVEPKSCDKTHTCPPCPAPEAAGGPSVFLFPPKPKDTLMISRTPEVTCVVVDVSHEDPEVKFNWYVDGVEVHNAKTKPREEQYNSTYRVVSVLTVLHQDWLNGKEYKCKVSNKALPAPIEKTISKAKGQPREPQVYTLPPSRDELTKNQVSLWCLVKGFYPSDIAVEWESYGTEWVNYKTTPPVLDSDGSFFLYSKLTVTKEEWQQGFVFSCSVLHEALHSHYTQKSLSLSPGK

SEQ ID NO: 270 - protein, 448 aa, Artificial Sequence
  Description of Artificial Sequence: Synthetic polypeptide
QVQLQQPGAELVRPGASVKLSCKASGYSFTGYWMNWLKQRPGQGLEWIGMIHPSDSEIRANQKFRDKATLTVDKSSTTAYMQLSSPTSEDSAVYYCARGTYDGGFEYWGQGTTLTVSSASTKGPSVFPLAPSSKSTSGGTAALGCLVKDYFPEPVTVSWNSGALTSGVHTFPAVLQSSGLYSLSSVVTVPSSSLGTQTYICNVNHKPSNTKVDKKVEPKSCDKTHTCPPCPAPELLGGPSVFLFPPKPKDTLMISRTPEVTCVVVDVSHEDPEVKFNWYVDGVEVHNAKTKPREEQYNSTYRVVSVLTVLHQDWLNGKEYKCKVSNKALPAPIEKTISKAKGQPREPQVYTLPPSRDELTKNQVSLSCAVKGFYPSDIAVEWESYGTEWVNYKTTPPVLDSDGSFFLVSKLTVTKEEWQQGFVFSCSVMHEALHNHYTQKSLSLSPGK

SEQ ID NO: 271 - protein, 448 aa, Artificial Sequence
  Description of Artificial Sequence: Synthetic polypeptide
QVQLQQPGAELVRPGASVKLSCKASGYSFTGYWMNWLKQRPGQGLEWIGMIHPSDSEIRANQKFRDKATLTVDKSSTTAYMQLSSPTSEDSAVYYCARGTYDGGFEYWGQGTTLTVSSASTKGPSVFPLAPSSKSTSGGTAALGCLVKDYFPEPVTVSWNSGALTSGVHTFPAVLQSSGLYSLSSVVTVPSSSLGTQTYICNVNHKPSNTKVDKKVEPKSCDKTHTCPPCPAPEAAGGPSVFLFPPKPKDTLMISRTPEVTCVVVDVSHEDPEVKFNWYVDGVEVHNAKTKPREEQYNSTYRVVSVLTVLHQDWLNGKEYKCKVSNKALPAPIEKTISKAKGQPREPQVYTLPPSRDELTKNQVSLSCAVKGFYPSDIAVEWESYGTEWVNYKTTPPVLDSDGSFFLVSKLTVTKEEWQQGFVFSCSVMHEALHNHYTQKSLSLSPGK

SEQ ID NO: 272 - protein, 448 aa, Artificial Sequence
  Description of Artificial Sequence: Synthetic polypeptide
QVQLQQPGAELVRPGASVKLSCKASGYSFTGYWMNWLKQRPGQGLEWIGMIHPSDSEIRANQKFRDKATLTVDKSSTTAYMQLSSPTSEDSAVYYCARGTYDGGFEYWGQGTTLTVSSASTKGPSVFPLAPSSKSTSGGTAALGCLVKDYFPEPVTVSWNSGALTSGVHTFPAVLQSSGLYSLSSVVTVPSSSLGTQTYICNVNHKPSNTKVDKKVEPKSCDKTHTCPPCPAPELLGGPSVFLFPPKPKDTLMISRTPEVTCVVVDVSHEDPEVKFNWYVDGVEVHNAKTKPREEQYNSTYRVVSVLTVLHQDWLNGKEYKCKVSNKALPAPIEKTISKAKGQPREPQVYTLPPSRDELTKNQVSLSCAVKGFYPSDIAVEWESYGTEWVNYKTTPPVLDSDGSFFLVSKLTVTKEEWQQGFVFSCSVLHEALHSHYTQKSLSLSPGK

SEQ ID NO: 273 - protein, 448 aa, Artificial Sequence
  Description of Artificial Sequence: Synthetic polypeptide
QVQLQQPGAELVRPGASVKLSCKASGYSFTGYWMNWLKQRPGQGLEWIGMIHPSDSEIRANQKFRDKATLTVDKSSTTAYMQLSSPTSEDSAVYYCARGTYDGGFEYWGQGTTLTVSSASTKGPSVFPLAPSSKSTSGGTAALGCLVKDYFPEPVTVSWNSGALTSGVHTFPAVLQSSGLYSLSSVVTVPSSSLGTQTYICNVNHKPSNTKVDKKVEPKSCDKTHTCPPCPAPEAAGGPSVFLFPPKPKDTLMISRTPEVTCVVVDVSHEDPEVKFNWYVDGVEVHNAKTKPREEQYNSTYRVVSVLTVLHQDWLNGKEYKCKVSNKALPAPIEKTISKAKGQPREPQVYTLPPSRDELTKNQVSLSCAVKGFYPSDIAVEWESYGTEWVNYKTTPPVLDSDGSFFLVSKLTVTKEEWQQGFVFSCSVLHEALHSHYTQKSLSLSPGK

SEQ ID NO: 274 - protein, 448 aa, Artificial Sequence
  Description of Artificial Sequence: Synthetic polypeptide
QVQLQQPGAELVRPGASVKLSCKASGYSFTGYWMNWLKQRPGQGLEWIGMIHPSDSEIRANQKFRDKATLTVDKSSTTAYMQLSSPTSEDSAVYYCARGTYDGGFEYWGQGTTLTVSSASTKGPSVFPLAPSSKSTSGGTAALGCLVKDYFPEPVTVSWNSGALTSGVHTFPAVLQSSGLYSLSSVVTVPSSSLGTQTYICNVNHKPSNTKVDKKVEPKSCDKTHTCPPCPAPELLGGPSVFLFPPKPKDTLMISRTPEVTCVVVDVSHEDPEVKFNWYVDGVEVHNAKTKPREEQYNSTYRVVSVLTVLHQDWLNGKEYKCKVSNKALPAPIEKTISKAKGQPREPQVYTLPPSRDELTKNQVSLWCLVKGFYPSDIAVEWESYGTEWSNYKTTPPVLDSDGSFFLYSKLTVSKEEWQQGFVFSCSVMHEALHNHYTQKSLSLSPGK

SEQ ID NO: 275 - protein, 448 aa, Artificial Sequence
  Description of Artificial Sequence: Synthetic polypeptide
QVQLQQPGAELVRPGASVKLSCKASGYSFTGYWMNWLKQRPGQGLEWIGMIHPSDSEIRANQKFRDKATLTVDKSSTTAYMQLSSPTSEDSAVYYCARGTYDGGFEYWGQGTTLTVSSASTKGPSVFPLAPSSKSTSGGTAALGCLVKDYFPEPVTVSWNSGALTSGVHTFPAVLQSSGLYSLSSVVTVPSSSLGTQTYICNVNHKPSNTKVDKKVEPKSCDKTHTCPPCPAPEAAGGPSVFLFPPKPKDTLMISRTPEVTCVVVDVSHEDPEVKFNWYVDGVEVHNAKTKPREEQYNSTYRVVSVLTVLHQDWLNGKEYKCKVSNKALPAPIEKTISKAKGQPREPQVYTLPPSRDELTKNQVSLWCLVKGFYPSDIAVEWESYGTEWSNYKTTPPVLDSDGSFFLYSKLTVSKEEWQQGFVFSCSVMHEALHNHYTQKSLSLSPGK

SEQ ID NO: 276 - protein, 448 aa, Artificial Sequence
  Description of Artificial Sequence: Synthetic polypeptide
QVQLQQPGAELVRPGASVKLSCKASGYSFTGYWMNWLKQRPGQGLEWIGMIHPSDSEIRANQKFRDKATLTVDKSSTTAYMQLSSPTSEDSAVYYCARGTYDGGFEYWGQGTTLTVSSASTKGPSVFPLAPSSKSTSGGTAALGCLVKDYFPEPVTVSWNSGALTSGVHTFPAVLQSSGLYSLSSVVTVPSSSLGTQTYICNVNHKPSNTKVDKKVEPKSCDKTHTCPPCPAPELLGGPSVFLFPPKPKDTLMISRTPEVTCVVVDVSHEDPEVKFNWYVDGVEVHNAKTKPREEQYNSTYRVVSVLTVLHQDWLNGKEYKCKVSNKALPAPIEKTISKAKGQPREPQVYTLPPSRDELTKNQVSLWCLVKGFYPSDIAVEWESYGTEWSNYKTTPPVLDSDGSFFLYSKLTVSKEEWQQGFVFSCSVLHEALHSHYTQKSLSLSPGK

SEQ ID NO: 277 - protein, 448 aa, Artificial Sequence
  Description of Artificial Sequence: Synthetic polypeptide
QVQLQQPGAELVRPGASVKLSCKASGYSFTGYWMNWLKQRPGQGLEWIGMIHPSDSEIRANQKFRDKATLTVDKSSTTAYMQLSSPTSEDSAVYYCARGTYDGGFEYWGQGTTLTVSSASTKGPSVFPLAPSSKSTSGGTAALGCLVKDYFPEPVTVSWNSGALTSGVHTFPAVLQSSGLYSLSSVVTVPSSSLGTQTYICNVNHKPSNTKVDKKVEPKSCDKTHTCPPCPAPEAAGGPSVFLFPPKPKDTLMISRTPEVTCVVVDVSHEDPEVKFNWYVDGVEVHNAKTKPREEQYNSTYRVVSVLTVLHQDWLNGKEYKCKVSNKALPAPIEKTISKAKGQPREPQVYTLPPSRDELTKNQVSLWCLVKGFYPSDIAVEWESYGTEWSNYKTTPPVLDSDGSFFLYSKLTVSKEEWQQGFVFSCSVLHEALHSHYTQKSLSLSPGK

SEQ ID NO: 278 - protein, 448 aa, Artificial Sequence
  Description of Artificial Sequence: Synthetic polypeptide
QVQLQQPGAELVRPGASVKLSCKASGYSFTGYWMNWLKQRPGQGLEWIGMIHPSDSEIRANQKFRDKATLTVDKSSTTAYMQLSSPTSEDSAVYYCARGTYDGGFEYWGQGTTLTVSSASTKGPSVFPLAPSSKSTSGGTAALGCLVKDYFPEPVTVSWNSGALTSGVHTFPAVLQSSGLYSLSSVVTVPSSSLGTQTYICNVNHKPSNTKVDKKVEPKSCDKTHTCPPCPAPELLGGPSVFLFPPKPKDTLMISRTPEVTCVVVDVSHEDPEVKFNWYVDGVEVHNAKTKPREEQYNSTYRVVSVLTVLHQDWLNGKEYKCKVSNKALPAPIEKTISKAKGQPREPQVYTLPPSRDELTKNQVSLSCAVKGFYPSDIAVEWESYGTEWSNYKTTPPVLDSDGSFFLVSKLTVSKEEWQQGFVFSCSVMHEALHNHYTQKSLSLSPGK

SEQ ID NO: 279 - protein, 448 aa, Artificial Sequence
  Description of Artificial Sequence: Synthetic polypeptide
QVQLQQPGAELVRPGASVKLSCKASGYSFTGYWMNWLKQRPGQGLEWIGMIHPSDSEIRANQKFRDKATLTVDKSSTTAYMQLSSPTSEDSAVYYCARGTYDGGFEYWGQGTTLTVSSASTKGPSVFPLAPSSKSTSGGTAALGCLVKDYFPEPVTVSWNSGALTSGVHTFPAVLQSSGLYSLSSVVTVPSSSLGTQTYICNVNHKPSNTKVDKKVEPKSCDKTHTCPPCPAPEAAGGPSVFLFPPKPKDTLMISRTPEVTCVVVDVSHEDPEVKFNWYVDGVEVHNAKTKPREEQYNSTYRVVSVLTVLHQDWLNGKEYKCKVSNKALPAPIEKTISKAKGQPREPQVYTLPPSRDELTKNQVSLSCAVKGFYPSDIAVEWESYGTEWSNYKTTPPVLDSDGSFFLVSKLTVSKEEWQQGFVFSCSVMHEALHNHYTQKSLSLSPGK

SEQ ID NO: 280 - protein, 448 aa, Artificial Sequence
  Description of Artificial Sequence: Synthetic polypeptide
QVQLQQPGAELVRPGASVKLSCKASGYSFTGYWMNWLKQRPGQGLEWIGMIHPSDSEIRANQKFRDKATLTVDKSSTTAYMQLSSPTSEDSAVYYCARGTYDGGFEYWGQGTTLTVSSASTKGPSVFPLAPSSKSTSGGTAALGCLVKDYFPEPVTVSWNSGALTSGVHTFPAVLQSSGLYSLSSVVTVPSSSLGTQTYICNVNHKPSNTKVDKKVEPKSCDKTHTCPPCPAPELLGGPSVFLFPPKPKDTLMISRTPEVTCVVVDVSHEDPEVKFNWYVDGVEVHNAKTKPREEQYNSTYRVVSVLTVLHQDWLNGKEYKCKVSNKALPAPIEKTISKAKGQPREPQVYTLPPSRDELTKNQVSLSCAVKGFYPSDIAVEWESYGTEWSNYKTTPPVLDSDGSFFLVSKLTVSKEEWQQGFVFSCSVLHEALHSHYTQKSLSLSPGK

SEQ ID NO: 281 - protein, 448 aa, Artificial Sequence
  Description of Artificial Sequence: Synthetic polypeptide
QVQLQQPGAELVRPGASVKLSCKASGYSFTGYWMNWLKQRPGQGLEWIGMIHPSDSEIRANQKFRDKATLTVDKSSTTAYMQLSSPTSEDSAVYYCARGTYDGGFEYWGQGTTLTVSSASTKGPSVFPLAPSSKSTSGGTAALGCLVKDYFPEPVTVSWNSGALTSGVHTFPAVLQSSGLYSLSSVVTVPSSSLGTQTYICNVNHKPSNTKVDKKVEPKSCDKTHTCPPCPAPEAAGGPSVFLFPPKPKDTLMISRTPEVTCVVVDVSHEDPEVKFNWYVDGVEVHNAKTKPREEQYNSTYRVVSVLTVLHQDWLNGKEYKCKVSNKALPAPIEKTISKAKGQPREPQVYTLPPSRDELTKNQVSLSCAVKGFYPSDIAVEWESYGTEWSNYKTTPPVLDSDGSFFLVSKLTVSKEEWQQGFVFSCSVLHEALHSHYTQKSLSLSPGK

SEQ ID NO: 282 - protein, 448 aa, Artificial Sequence
  Description of Artificial Sequence: Synthetic polypeptide
QVQLQQPGAELVRPGASVKLSCKASGYSFTGYWMNWLKQRPGQGLEWIGMIHPSDSEIRANQKFRDKATLTVDKSSTTAYMQLSSPTSEDSAVYYCARGTYDGGFEYWGQGTTLTVSSASTKGPSVFPLAPSSKSTSGGTAALGCLVKDYFPEPVTVSWNSGALTSGVHTFPAVLQSSGLYSLSSVVTVPSSSLGTQTYICNVNHKPSNTKVDKKVEPKSCDKTHTCPPCPAPELLGGPSVFLFPPKPKDTLMISRTPEVTCVVVDVSHEDPEVKFNWYVDGVEVHNAKTKPREEQYNSTYRVVSVLTVLHQDWLNGKEYKCKVSNKALPAPIEKTISKAKGQPREPQVYTLPPSRDELTKNQVSLWCLVKGFYPSDIAVEWESYGTEWSNYKTTPPVLDSDGSFFLYSKLTVTKEEWQQGFVFSCSVMHEALHNHYTQKSLSLSPGK

SEQ ID NO: 283 - protein, 448 aa, Artificial Sequence
  Description of Artificial Sequence: Synthetic polypeptide
QVQLQQPGAELVRPGASVKLSCKASGYSFTGYWMNWLKQRPGQGLEWIGMIHPSDSEIRANQKFRDKATLTVDKSSTTAYMQLSSPTSEDSAVYYCARGTYDGGFEYWGQGTTLTVSSASTKGPSVFPLAPSSKSTSGGTAALGCLVKDYFPEPVTVSWNSGALTSGVHTFPAVLQSSGLYSLSSVVTVPSSSLGTQTYICNVNHKPSNTKVDKKVEPKSCDKTHTCPPCPAPEAAGGPSVFLFPPKPKDTLMISRTPEVTCVVVDVSHEDPEVKFNWYVDGVEVHNAKTKPREEQYNSTYRVVSVLTVLHQDWLNGKEYKCKVSNKALPAPIEKTISKAKGQPREPQVYTLPPSRDELTKNQVSLWCLVKGFYPSDIAVEWESYGTEWSNYKTTPPVLDSDGSFFLYSKLTVTKEEWQQGFVFSCSVMHEALHNHYTQKSLSLSPGK

SEQ ID NO: 284 - protein, 448 aa, Artificial Sequence
  Description of Artificial Sequence: Synthetic polypeptide
QVQLQQPGAELVRPGASVKLSCKASGYSFTGYWMNWLKQRPGQGLEWIGMIHPSDSEIRANQKFRDKATLTVDKSSTTAYMQLSSPTSEDSAVYYCARGTYDGGFEYWGQGTTLTVSSASTKGPSVFPLAPSSKSTSGGTAALGCLVKDYFPEPVTVSWNSGALTSGVHTFPAVLQSSGLYSLSSVVTVPSSSLGTQTYICNVNHKPSNTKVDKKVEPKSCDKTHTCPPCPAPELLGGPSVFLFPPKPKDTLMISRTPEVTCVVVDVSHEDPEVKFNWYVDGVEVHNAKTKPREEQYNSTYRVVSVLTVLHQDWLNGKEYKCKVSNKALPAPIEKTISKAKGQPREPQVYTLPPSRDELTKNQVSLWCLVKGFYPSDIAVEWESYGTEWSNYKTTPPVLDSDGSFFLYSKLTVTKEEWQQGFVFSCSVLHEALHSHYTQKSLSLSPGK

SEQ ID NO: 285 - protein, 448 aa, Artificial Sequence
  Description of Artificial Sequence: Synthetic polypeptide
QVQLQQPGAELVRPGASVKLSCKASGYSFTGYWMNWLKQRPGQGLEWIGMIHPSDSEIRANQKFRDKATLTVDKSSTTAYMQLSSPTSEDSAVYYCARGTYDGGFEYWGQGTTLTVSSASTKGPSVFPLAPSSKSTSGGTAALGCLVKDYFPEPVTVSWNSGALTSGVHTFPAVLQSSGLYSLSSVVTVPSSSLGTQTYICNVNHKPSNTKVDKKVEPKSCDKTHTCPPCPAPEAAGGPSVFLFPPKPKDTLMISRTPEVTCVVVDVSHEDPEVKFNWYVDGVEVHNAKTKPREEQYNSTYRVVSVLTVLHQDWLNGKEYKCKVSNKALPAPIEKTISKAKGQPREPQVYTLPPSRDELTKNQVSLWCLVKGFYPSDIAVEWESYGTEWSNYKTTPPVLDSDGSFFLYSKLTVTKEEWQQGFVFSCSVLHEALHSHYTQKSLSLSPGK

SEQ ID NO: 286 - protein, 448 aa, Artificial Sequence
  Description of Artificial Sequence: Synthetic polypeptide
QVQLQQPGAELVRPGASVKLSCKASGYSFTGYWMNWLKQRPGQGLEWIGMIHPSDSEIRANQKFRDKATLTVDKSSTTAYMQLSSPTSEDSAVYYCARGTYDGGFEYWGQGTTLTVSSASTKGPSVFPLAPSSKSTSGGTAALGCLVKDYFPEPVTVSWNSGALTSGVHTFPAVLQSSGLYSLSSVVTVPSSSLGTQTYICNVNHKPSNTKVDKKVEPKSCDKTHTCPPCPAPELLGGPSVFLFPPKPKDTLMISRTPEVTCVVVDVSHEDPEVKFNWYVDGVEVHNAKTKPREEQYNSTYRVVSVLTVLHQDWLNGKEYKCKVSNKALPAPIEKTISKAKGQPREPQVYTLPPSRDELTKNQVSLSCAVKGFYPSDIAVEWESYGTEWSNYKTTPPVLDSDGSFFLVSKLTVTKEEWQQGFVFSCSVMHEALHNHYTQKSLSLSPGK

SEQ ID NO: 287 - protein, 448 aa, Artificial Sequence
  Description of Artificial Sequence: Synthetic polypeptide
QVQLQQPGAELVRPGASVKLSCKASGYSFTGYWMNWLKQRPGQGLEWIGMIHPSDSEIRANQKFRDKATLTVDKSSTTAYMQLSSPTSEDSAVYYCARGTYDGGFEYWGQGTTLTVSSASTKGPSVFPLAPSSKSTSGGTAALGCLVKDYFPEPVTVSWNSGALTSGVHTFPAVLQSSGLYSLSSVVTVPSSSLGTQTYICNVNHKPSNTKVDKKVEPKSCDKTHTCPPCPAPEAAGGPSVFLFPPKPKDTLMISRTPEVTCVVVDVSHEDPEVKFNWYVDGVEVHNAKTKPREEQYNSTYRVVSVLTVLHQDWLNGKEYKCKVSNKALPAPIEKTISKAKGQPREPQVYTLPPSRDELTKNQVSLSCAVKGFYPSDIAVEWESYGTEWSNYKTTPPVLDSDGSFFLVSKLTVTKEEWQQGFVFSCSVMHEALHNHYTQKSLSLSPGK

SEQ ID NO: 288 - protein, 448 aa, Artificial Sequence
  Description of Artificial Sequence: Synthetic polypeptide
QVQLQQPGAELVRPGASVKLSCKASGYSFTGYWMNWLKQRPGQGLEWIGMIHPSDSEIRANQKFRDKATLTVDKSSTTAYMQLSSPTSEDSAVYYCARGTYDGGFEYWGQGTTLTVSSASTKGPSVFPLAPSSKSTSGGTAALGCLVKDYFPEPVTVSWNSGALTSGVHTFPAVLQSSGLYSLSSVVTVPSSSLGTQTYICNVNHKPSNTKVDKKVEPKSCDKTHTCPPCPAPELLGGPSVFLFPPKPKDTLMISRTPEVTCVVVDVSHEDPEVKFNWYVDGVEVHNAKTKPREEQYNSTYRVVSVLTVLHQDWLNGKEYKCKVSNKALPAPIEKTISKAKGQPREPQVYTLPPSRDELTKNQVSLSCAVKGFYPSDIAVEWESYGTEWSNYKTTPPVLDSDGSFFLVSKLTVTKEEWQQGFVFSCSVLHEALHSHYTQKSLSLSPGK

SEQ ID NO: 289 - protein, 448 aa, Artificial Sequence
  Description of Artificial Sequence: Synthetic polypeptide
QVQLQQPGAELVRPGASVKLSCKASGYSFTGYWMNWLKQRPGQGLEWIGMIHPSDSEIRANQKFRDKATLTVDKSSTTAYMQLSSPTSEDSAVYYCARGTYDGGFEYWGQGTTLTVSSASTKGPSVFPLAPSSKSTSGGTAALGCLVKDYFPEPVTVSWNSGALTSGVHTFPAVLQSSGLYSLSSVVTVPSSSLGTQTYICNVNHKPSNTKVDKKVEPKSCDKTHTCPPCPAPEAAGGPSVFLFPPKPKDTLMISRTPEVTCVVVDVSHEDPEVKFNWYVDGVEVHNAKTKPREEQYNSTYRVVSVLTVLHQDWLNGKEYKCKVSNKALPAPIEKTISKAKGQPREPQVYTLPPSRDELTKNQVSLSCAVKGFYPSDIAVEWESYGTEWSNYKTTPPVLDSDGSFFLVSKLTVTKEEWQQGFVFSCSVLHEALHSHYTQKSLSLSPGK

SEQ ID NO: 290 - protein, 448 aa, Artificial Sequence
  Description of Artificial Sequence: Synthetic polypeptide
QVQLQQPGAELVRPGASVKLSCKASGYSFTGYWMNWLKQRPGQGLEWIGMIHPSDSEIRANQKFRDKATLTVDKSSTTAYMQLSSPTSEDSAVYYCARGTYDGGFEYWGQGTTLTVSSASTKGPSVFPLAPSSKSTSGGTAALGCLVKDYFPEPVTVSWNSGALTSGVHTFPAVLQSSGLYSLSSVVTVPSSSLGTQTYICNVNHKPSNTKVDKKVEPKSCDKTHTCPPCPAPELLGGPSVFLFPPKPKDTLMISRTPEVTCVVVDVSHEDPEVKFNWYVDGVEVHNAKTKPREEQYNSTYRVVSVLTVLHQDWLNGKEYKCKVSNKALPAPIEKTISKAKGQPREPQVYTLPPSRDELTKNQVSLSCAVKGFYPSDIAVEWESNGQPENNYKTTPPVLDSDGSFFLVSKLTVDKSRWQQGNVFSCSVMHEALHNHYTQKSLSLSPGK

SEQ ID NO: 291 - protein, 448 aa, Artificial Sequence
  Description of Artificial Sequence: Synthetic polypeptide
QVQLQQPGAELVRPGASVKLSCKASGYSFTGYWMNWLKQRPGQGLEWIGMIHPSDSEIRANQKFRDKATLTVDKSSTTAYMQLSSPTSEDSAVYYCARGTYDGGFEYWGQGTTLTVSSASTKGPSVFPLAPSSKSTSGGTAALGCLVKDYFPEPVTVSWNSGALTSGVHTFPAVLQSSGLYSLSSVVTVPSSSLGTQTYICNVNHKPSNTKVDKKVEPKSCDKTHTCPPCPAPELLGGPSVFLFPPKPKDTLMISRTPEVTCVVVDVSHEDPEVKFNWYVDGVEVHNAKTKPREEQYNSTYRVVSVLTVLHQDWLNGKEYKCKVSNKALPAPIEKTISKAKGQPREPQVYTLPPSRDELTKNQVSLSCAVKGFYPSDIAVEWESNGQPENNYKTTPPVLDSDGSFFLVSKLTVDKSRWQQGNVFSCSVLHEALHSHYTQKSLSLSPGK

SEQ ID NO: 292 - protein, 448 aa, Artificial Sequence
  Description of Artificial Sequence: Synthetic polypeptide
QVQLQQPGAELVRPGASVKLSCKASGYSFTGYWMNWLKQRPGQGLEWIGMIHPSDSEIRANQKFRDKATLTVDKSSTTAYMQLSSPTSEDSAVYYCARGTYDGGFEYWGQGTTLTVSSASTKGPSVFPLAPSSKSTSGGTAALGCLVKDYFPEPVTVSWNSGALTSGVHTFPAVLQSSGLYSLSSVVTVPSSSLGTQTYICNVNHKPSNTKVDKKVEPKSCDKTHTCPPCPAPEAAGGPSVFLFPPKPKDTLMISRTPEVTCVVVDVSHEDPEVKFNWYVDGVEVHNAKTKPREEQYNSTYRVVSVLTVLHQDWLNGKEYKCKVSNKALPAPIEKTISKAKGQPREPQVYTLPPSRDELTKNQVSLSCAVKGFYPSDIAVEWESNGQPENNYKTTPPVLDSDGSFFLVSKLTVDKSRWQQGNVFSCSVLHEALHSHYTQKSLSLSPGK

SEQ ID NO: 293 - protein, 219 aa, Artificial Sequence
  Description of Artificial Sequence: Synthetic polypeptide
DIVLTQSPASLVVSLGQRATISCRASQSVSGSRFTYMHWYQQKPGQPPKLLIKYASILESGVPARFSGGGSGTDFTLNIHPVEEDDTATYYCQHSWEIPPWTFGGGTKLEIKRTVAAPSVFIFPPSDEQLKSGTASVVCLLNNFYPREAKVQWKVDNALQSGNSQESVTEQDSKDSTYSLSSTLTLSKADYEKHKVYACEVTHQGLSSPVTKSFNRGEC

SEQ ID NO: 294 - protein, 448 aa, Artificial Sequence
  Description of Artificial Sequence: Synthetic polypeptide
QVQLQQPGAELVRPGASVKLSCKASGYSFTGYWMNWLKQRPGQGLEWIGMIHPSDSEIRANQKFRDKATLTVDKSSTTAYMQLSSPTSEDSAVYYCARGTYDGGFEYWGQGTTLTVSSASTKGPSVFPLAPSSKSTSGGTAALGCLVKDYFPEPVTVSWNSGALTSGVHTFPAVLQSSGLYSLSSVVTVPSSSLGTQTYICNVNHKPSNTKVDKKVEPKSCDKTHTCPPCPAPELLGGPSVFLFPPKPKDTLMISRTPEVTCVVVDVSHEDPEVKFNWYVDGVEVHNAKTKPREEQYNSTYRVVSVLTVLHQDWLNGKEYKCKVSNKALPAPIEKTISKAKGQPREPQVYTLPPSRDELTKNQVSLWCLVKGFYPSDIAVEWESNGQPENNYKTTPPVLDSDGSFFLYSKLTVDKSRWQQGNVFSCSVMHEALHNHYTQKSLSLSPGK

SEQ ID NO: 295 - protein, 448 aa, Artificial Sequence
  Description of Artificial Sequence: Synthetic polypeptide
QVQLQQPGAELVRPGASVKLSCKASGYSFTGYWMNWLKQRPGQGLEWIGMIHPSDSEIRANQKFRDKATLTVDKSSTTAYMQLSSPTSEDSAVYYCARGTYDGGFEYWGQGTTLTVSSASTKGPSVFPLAPSSKSTSGGTAALGCLVKDYFPEPVTVSWNSGALTSGVHTFPAVLQSSGLYSLSSVVTVPSSSLGTQTYICNVNHKPSNTKVDKKVEPKSCDKTHTCPPCPAPELLGGPSVFLFPPKPKDTLMISRTPEVTCVVVDVSHEDPEVKFNWYVDGVEVHNAKTKPREEQYNSTYRVVSVLTVLHQDWLNGKEYKCKVSNKALPAPIEKTISKAKGQPREPQVYTLPPSRDELTKNQVSLWCLVKGFYPSDIAVEWESNGQPENNYKTTPPVLDSDGSFFLYSKLTVDKSRWQQGNVFSCSVLHEALHSHYTQKSLSLSPGK

SEQ ID NO: 296 - protein, 450 aa, Artificial Sequence
  Description of Artificial Sequence: Synthetic polypeptide
EVQLVESGGGLVQPGGSLRLSCAASGFNIKDTYIHWVRQAPGKGLEWVARIYPTNGYTRYADSVKGRFTISADTSKNTAYLQMNSLRAEDTAVYYCSRWGGDGFYAMDYWGQGTLVTVSSASTKGPSVFPLAPSSKSTSGGTAALGCLVKDYFPEPVTVSWNSGALTSGVHTFPAVLQSSGLYSLSSVVTVPSSSLGTQTYICNVNHKPSNTKVDKKVEPKSCDKTHTCPPCPAPEAAGGPSVFLFPPKPKDTLMISRTPEVTCVVVDVSHEDPEVKFNWYVDGVEVHNAKTKPREEQYNSTYRVVSVLTVLHQDWLNGKEYKCKVSNKALPAPIEKTISKAKGQPREPQVYTLPPSRDELTKNQVSLWCLVKGFYPSDIAVEWESNGQPENNYKTTPPVLDSDGSFFLYSKLTVDKSRWQQGNVFSCSVMHEALHNHYTQKSLSLSPGK

SEQ ID NO: 297 - protein, 449 aa, Artificial Sequence
  Description of Artificial Sequence: Synthetic polypeptide
EVQLVESGGGLVQPGGSLRLSCAASGFTFTDYTMDWVRQAPGKGLEWVADVNPNSGGSIYNQRFKGRFTLSVDRSKNTLYLQMNSLRAEDTAVYYCARNLGPSFYFDYWGQGTLVTVSSASTKGPSVFPLAPSSKSTSGGTAALGCLVKDYFPEPVTVSWNSGALTSGVHTFPAVLQSSGLYSLSSVVTVPSSSLGTQTYICNVNHKPSNTKVDKKVEPKSCDKTHTCPPCPAPEAAGGPSVFLFPPKPKDTLMISRTPEVTCVVVDVSHEDPEVKFNWYVDGVEVHNAKTKPREEQYNSTYRVVSVLTVLHQDWLNGKEYKCKVSNKALPAPIEKTISKAKGQPREPQVYTLPPSRDELTKNQVSLWCLVKGFYPSDIAVEWESNGQPENNYKTTPPVLDSDGSFFLYSKLTVDKSRWQQGNVFSCSVMHEALHNHYTQKSLSLSPGK

SEQ ID NO: 298 - protein, 448 aa, Artificial Sequence
  Description of Artificial Sequence: Synthetic polypeptide
QVQLQQPGAELVRPGASVKLSCKASGYSFTGYWMNWLKQRPGQGLEWIGMIHPSDSEIRANQKFRDKATLTVDKSSTTAYMQLSSPTSEDSAVYYCARGTYDGGFEYWGQGTTLTVSSASTKGPSVFPLAPSSKSTSGGTAALGCLVKDYFPEPVTVSWNSGALTSGVHTFPAVLQSSGLYSLSSVVTVPSSSLGTQTYICNVNHKPSNTKVDKKVEPKSCDKTHTCPPCPAPEAAGGPSVFLFPPKPKDTLMISRTPEVTCVVVDVSHEDPEVKFNWYVDGVEVHNAKTKPREEQYNSTYRVVSVLTVLHQDWLNGKEYKCKVSNKALPAPIEKTISKAKGQPREPQVYTLPPSRDELTKNQVSLWCLVKGFYPSDIAVEWESNGQPENNYKTTPPVLDSDGSFFLYSKLTVDKSRWQQGNVFSCSVMHEALHNHYTQKSLSLSPGK

SEQ ID NO: 299 - protein, 450 aa, Artificial Sequence
  Description of Artificial Sequence: Synthetic polypeptide
EVQLVESGGGLVQPGGSLRLSCAASGFNIKDTYIHWVRQAPGKGLEWVARIYPTNGYTRYADSVKGRFTISADTSKNTAYLQMNSLRAEDTAVYYCSRWGGDGFYAMDYWGQGTLVTVSSASTKGPSVFPLAPSSKSTSGGTAALGCLVKDYFPEPVTVSWNSGALTSGVHTFPAVLQSSGLYSLSSVVTVPSSSLGTQTYICNVNHKPSNTKVDKKVEPKSCDKTHTCPPCPAPEAAGGPSVFLFPPKPKDTLMISRTPEVTCVVVDVSHEDPEVKFNWYVDGVEVHNAKTKPREEQYNSTYRVVSVLTVLHQDWLNGKEYKCKVSNKALPAPIEKTISKAKGQPREPQVYTLPPSRDELTKNQVSLWCLVKGFYPSDIAVEWESNGQPENNYKTTPPVLDSDGSFFLYSKLTVDKSRWQQGNVFSCSVLHEALHSHYTQKSLSLSPGK

SEQ ID NO: 300 - protein, 449 aa, Artificial Sequence
  Description of Artificial Sequence: Synthetic polypeptide
EVQLVESGGGLVQPGGSLRLSCAASGFTFTDYTMDWVRQAPGKGLEWVADVNPNSGGSIYNQRFKGRFTLSVDRSKNTLYLQMNSLRAEDTAVYYCARNLGPSFYFDYWGQGTLVTVSSASTKGPSVFPLAPSSKSTSGGTAALGCLVKDYFPEPVTVSWNSGALTSGVHTFPAVLQSSGLYSLSSVVTVPSSSLGTQTYICNVNHKPSNTKVDKKVEPKSCDKTHTCPPCPAPEAAGGPSVFLFPPKPKDTLMISRTPEVTCVVVDVSHEDPEVKFNWYVDGVEVHNAKTKPREEQYNSTYRVVSVLTVLHQDWLNGKEYKCKVSNKALPAPIEKTISKAKGQPREPQVYTLPPSRDELTKNQVSLWCLVKGFYPSDIAVEWESNGQPENNYKTTPPVLDSDGSFFLYSKLTVDKSRWQQGNVFSCSVLHEALHSHYTQKSLSLSPGK

SEQ ID NO: 301 - protein, 448 aa, Artificial Sequence
  Description of Artificial Sequence: Synthetic polypeptide
QVQLQQPGAELVRPGASVKLSCKASGYSFTGYWMNWLKQRPGQGLEWIGMIHPSDSEIRANQKFRDKATLTVDKSSTTAYMQLSSPTSEDSAVYYCARGTYDGGFEYWGQGTTLTVSSASTKGPSVFPLAPSSKSTSGGTAALGCLVKDYFPEPVTVSWNSGALTSGVHTFPAVLQSSGLYSLSSVVTVPSSSLGTQTYICNVNHKPSNTKVDKKVEPKSCDKTHTCPPCPAPEAAGGPSVFLFPPKPKDTLMISRTPEVTCVVVDVSHEDPEVKFNWYVDGVEVHNAKTKPREEQYNSTYRVVSVLTVLHQDWLNGKEYKCKVSNKALPAPIEKTISKAKGQPREPQVYTLPPSRDELTKNQVSLWCLVKGFYPSDIAVEWESNGQPENNYKTTPPVLDSDGSFFLYSKLTVDKSRWQQGNVFSCSVLHEALHSHYTQKSLSLSPGK

SEQ ID NO: 302 - protein, 450 aa, Artificial Sequence
  Description of Artificial Sequence: Synthetic polypeptide
EVQLVESGGGLVQPGGSLRLSCAASGFNIKDTYIHWVRQAPGKGLEWVARIYPTNGYTRYADSVKGRFTISADTSKNTAYLQMNSLRAEDTAVYYCSRWGGDGFYAMDYWGQGTLVTVSSASTKGPSVFPLAPSSKSTSGGTAALGCLVKDYFPEPVTVSWNSGALTSGVHTFPAVLQSSGLYSLSSVVTVPSSSLGTQTYICNVNHKPSNTKVDKKVEPKSCDKTHTCPPCPAPEAAGGPSVFLFPPKPKDTLMISRTPEVTCVVVDVSHEDPEVKFNWYVDGVEVHNAKTKPREEQYNSTYRVVSVLTVLHQDWLNGKEYKCKVSNKALPAPIEKTISKAKGQPREPQVYTLPPSRDELTKNQVSLSCAVKGFYPSDIAVEWESNGQPENNYKTTPPVLDSDGSFFLVSKLTVDKSRWQQGNVFSCSVMHEALHNHYTQKSLSLSPGK

SEQ ID NO: 303 - protein, 449 aa, Artificial Sequence
  Description of Artificial Sequence: Synthetic polypeptide
EVQLVESGGGLVQPGGSLRLSCAASGFTFTDYTMDWVRQAPGKGLEWVADVNPNSGGSIYNQRFKGRFTLSVDRSKNTLYLQMNSLRAEDTAVYYCARNLGPSFYFDYWGQGTLVTVSSASTKGPSVFPLAPSSKSTSGGTAALGCLVKDYFPEPVTVSWNSGALTSGVHTFPAVLQSSGLYSLSSVVTVPSSSLGTQTYICNVNHKPSNTKVDKKVEPKSCDKTHTCPPCPAPEAAGGPSVFLFPPKPKDTLMISRTPEVTCVVVDVSHEDPEVKFNWYVDGVEVHNAKTKPREEQYNSTYRVVSVLTVLHQDWLNGKEYKCKVSNKALPAPIEKTISKAKGQPREPQVYTLPPSRDELTKNQVSLSCAVKGFYPSDIAVEWESNGQPENNYKTTPPVLDSDGSFFLVSKLTVDKSRWQQGNVFSCSVMHEALHNHYTQKSLSLSPGK

SEQ ID NO: 304 - protein, 448 aa, Artificial Sequence
  Description of Artificial Sequence: Synthetic polypeptide
QVQLQQPGAELVRPGASVKLSCKASGYSFTGYWMNWLKQRPGQGLEWIGMIHPSDSEIRANQKFRDKATLTVDKSSTTAYMQLSSPTSEDSAVYYCARGTYDGGFEYWGQGTTLTVSSASTKGPSVFPLAPSSKSTSGGTAALGCLVKDYFPEPVTVSWNSGALTSGVHTFPAVLQSSGLYSLSSVVTVPSSSLGTQTYICNVNHKPSNTKVDKKVEPKSCDKTHTCPPCPAPEAAGGPSVFLFPPKPKDTLMISRTPEVTCVVVDVSHEDPEVKFNWYVDGVEVHNAKTKPREEQYNSTYRVVSVLTVLHQDWLNGKEYKCKVSNKALPAPIEKTISKAKGQPREPQVYTLPPSRDELTKNQVSLSCAVKGFYPSDIAVEWESNGQPENNYKTTPPVLDSDGSFFLVSKLTVDKSRWQQGNVFSCSVMHEALHNHYTQKSLSLSPGK

SEQ ID NO: 305 - protein, 450 aa, Artificial Sequence
  Description of Artificial Sequence: Synthetic polypeptide
EVQLVESGGGLVQPGGSLRLSCAASGFNIKDTYIHWVRQAPGKGLEWVARIYPTNGYTRYADSVKGRFTISADTSKNTAYLQMNSLRAEDTAVYYCSRWGGDGFYAMDYWGQGTLVTVSSASTKGPSVFPLAPSSKSTSGGTAALGCLVKDYFPEPVTVSWNSGALTSGVHTFPAVLQSSGLYSLSSVVTVPSSSLGTQTYICNVNHKPSNTKVDKKVEPKSCDKTHTCPPCPAPEAAGGPSVFLFPPKPKDTLMISRTPEVTCVVVDVSHEDPEVKFNWYVDGVEVHNAKTKPREEQYNSTYRVVSVLTVLHQDWLNGKEYKCKVSNKALPAPIEKTISKAKGQPREPQVYTLPPSRDELTKNQVSLSCAVKGFYPSDIAVEWESNGQPENNYKTTPPVLDSDGSFFLVSKLTVDKSRWQQGNVFSCSVLHEALHSHYTQKSLSLSPGK

SEQ ID NO: 306 - protein, 449 aa, Artificial Sequence
  Description of Artificial Sequence: Synthetic polypeptide
EVQLVESGGGLVQPGGSLRLSCAASGFTFTDYTMDWVRQAPGKGLEWVADVNPNSGGSIYNQRFKGRFTLSVDRSKNTLYLQMNSLRAEDTAVYYCARNLGPSFYFDYWGQGTLVTVSSASTKGPSVFPLAPSSKSTSGGTAALGCLVKDYFPEPVTVSWNSGALTSGVHTFPAVLQSSGLYSLSSVVTVPSSSLGTQTYICNVNHKPSNTKVDKKVEPKSCDKTHTCPPCPAPEAAGGPSVFLFPPKPKDTLMISRTPEVTCVVVDVSHEDPEVKFNWYVDGVEVHNAKTKPREEQYNSTYRVVSVLTVLHQDWLNGKEYKCKVSNKALPAPIEKTISKAKGQPREPQVYTLPPSRDELTKNQVSLSCAVKGFYPSDIAVEWESNGQPENNYKTTPPVLDSDGSFFLVSKLTVDKSRWQQGNVFSCSVLHEALHSHYTQKSLSLSPGK

SEQ ID NO: 307 - protein, 448 aa, Artificial Sequence
  Description of Artificial Sequence: Synthetic polypeptide
QVQLQQPGAELVRPGASVKLSCKASGYSFTGYWMNWLKQRPGQGLEWIGMIHPSDSEIRANQKFRDKATLTVDKSSTTAYMQLSSPTSEDSAVYYCARGTYDGGFEYWGQGTTLTVSSASTKGPSVFPLAPSSKSTSGGTAALGCLVKDYFPEPVTVSWNSGALTSGVHTFPAVLQSSGLYSLSSVVTVPSSSLGTQTYICNVNHKPSNTKVDKKVEPKSCDKTHTCPPCPAPELLGGPSVFLFPPKPKDTLMISRTPEVTCVVVDVSHEDPEVKFNWYVDGVEVHNAKTKPREEQYNSTYRVVSVLTVLHQDWLNGKEYKCKVSNKALPAPIEKTISKAKGQPREPQVYTLPPSRDELTKNQVSLTCLVKGFYPSDIAVEWESNGQPENNYKTTPPVLDSDGSFFLYSKLTVDKSRWQQGNVFSCSVMHEALHNHYTQKSLSLSPGK

SEQ ID NO: 308 - protein, 228 aa, Artificial Sequence
  Description of Artificial Sequence: Synthetic polypeptide
EVQLVESGGGLVQPGGSLRLSCAASGFNIKDTYIHWVRQAPGKGLEWVARIYPTNGYTRYADSVKGRFTISADTSKNTAYLQMNSLRAEDTAVYYCSRWGGDGFYAMDYWGQGTLVTVSSASTKGPSVFPLAPSSKSTSGGTAALGCLVKDYFPEPVTVSWNSGALTSGVHTFPAVLQSSGLYSLSSVVTVPSSSLGTQTYICNVNHKPSNTKVDKKVEPKSCDKTHT

SEQ ID NO: 309 - protein, 227 aa, Artificial Sequence
  Description of Artificial Sequence: Synthetic polypeptide
EVQLVESGGGLVQPGGSLRLSCAASGFTFTDYTMDWVRQAPGKGLEWVADVNPNSGGSIYNQRFKGRFTLSVDRSKNTLYLQMNSLRAEDTAVYYCARNLGPSFYFDYWGQGTLVTVSSASTKGPSVFPLAPSSKSTSGGTAALGCLVKDYFPEPVTVSWNSGALTSGVHTFPAVLQSSGLYSLSSVVTVPSSSLGTQTYICNVNHKPSNTKVDKKVEPKSCDKTHT

SEQ ID NO: 310 - protein, 226 aa, Artificial Sequence
  Description of Artificial Sequence: Synthetic polypeptide
QVQLQQPGAELVRPGASVKLSCKASGYSFTGYWMNWLKQRPGQGLEWIGMIHPSDSEIRANQKFRDKATLTVDKSSTTAYMQLSSPTSEDSAVYYCARGTYDGGFEYWGQGTTLTVSSASTKGPSVFPLAPSSKSTSGGTAALGCLVKDYFPEPVTVSWNSGALTSGVHTFPAVLQSSGLYSLSSVVTVPSSSLGTQTYICNVNHKPSNTKVDKKVEPKSCDKTHT

SEQ ID NO: 311 - protein, 454 aa, Artificial Sequence
  Description of Artificial Sequence: Synthetic polypeptide
QVQLVESGGGVVQPGRSLRLSCAASGFAFSSYGMHWVRQAPGKGLEWVAVIWFDGTKKYYTDSVKGRFTISRDNSKNTLYLQMNTLRAEDTAVYYCARDRGIGARRGPYYMDVWGKGTTVTVSSASTKGPSVFPLAPSSKSTSGGTAALGCLVKDYFPEPVTVSWNSGALTSGVHTFPAVLQSSGLYSLSSVVTVPSSSLGTQTYICNVNHKPSNTKVDKKVEPKSCDKTHTCPPCPAPEAAGGPSVFLFPPKPKDTLMISRTPEVTCVVVDVSHEDPEVKFNWYVDGVEVHNAKTKPREEQYNSTYRVVSVLTVLHQDWLNGKEYKCKVSNKALPAPIEKTISKAKGQPREPQVYTLPPSRDELTKNQVSLWCLVKGFYPSDIAVEWESYGTEWSNYKTTPPVLDSDGSFFLYSKLTVSKEEWQQGFVFSCSVMHEALHNHYTQKSLSLSPGK

SEQ ID NO: 312 - protein, 454 aa, Artificial Sequence
  Description of Artificial Sequence: Synthetic polypeptide
QVQLVESGGGVVQPGRSLRLSCAASGFAFSSYGMHWVRQAPGKGLEWVAVIWFDGTKKYYTDSVKGRFTISRDNSKNTLYLQMNTLRAEDTAVYYCARDRGIGARRGPYYMDVWGKGTTVTVSSASTKGPSVFPLAPSSKSTSGGTAALGCLVKDYFPEPVTVSWNSGALTSGVHTFPAVLQSSGLYSLSSVVTVPSSSLGTQTYICNVNHKPSNTKVDKKVEPKSCDKTHTCPPCPAPELLGGPSVFLFPPKPKDTLMISRTPEVTCVVVDVSHEDPEVKFNWYVDGVEVHNAKTKPREEQYNSTYRVVSVLTVLHQDWLNGKEYKCKVSNKALPAPIEKTISKAKGQPREPQVYTLPPSRDELTKNQVSLSCAVKGFYPSDIAVEWESNGQPENNYKTTPPVLDSDGSFFLVSKLTVDKSRWQQGNVFSCSVMHEALHNHYTQKSLSLSPGK

SEQ ID NO: 313 - protein, 214 aa, Artificial Sequence
  Description of Artificial Sequence: Synthetic polypeptide
DIQMTQSPSSLSASVGDRVTITCRASQSISSYLNWYQQKPGKAPKLLIYAASSLQSGVPSRFSGSGSGTDFTLTISSLQPEDFATYYCQQSYSTPLTFGGGTKVEIKRTVAAPSVFIFPPSDEQLKSGTASVVCLLNNFYPREAKVQWKVDNALQSGNSQESVTEQDSKDSTYSLSSTLTLSKADYEKHKVYACEVTHQGLSSPVTKSFNRGEC

SEQ ID NO: 314 - protein, 6 aa, Artificial Sequence
  Description of Artificial Sequence: Synthetic 6xHis tag
HHHHHH
